(19) United States
(12) Patent Application Publication
(10) Pub. No.: US 2024/0269326 A1
(43) Pub. Date: Aug. 15, 2024

(54) METHODS AND COMPOSITIONS FOR TREATING OCULAR DISEASES AND DISORDERS

(71) Applicant: Abeona Therapeutics Inc., New York, NY (US)

(72) Inventors: Linas PADEGIMAS, Mayfield, OH (US); Brian KEVANY, New York, NY (US)

(21) Appl. No.: 18/561,784

(22) PCT Filed: May 18, 2022
(86) PCT No.: PCT/US2022/029797

§ 371 Date: Nov. 17, 2023

Related U.S. Application Data
(60) Provisional application No. 63/189,836, filed on May 18, 2021.
(60) Provisional application No. 63/275,527, filed on Nov. 4, 2021.
(60) Provisional application No. 63/334,949, filed on Apr. 26, 2022.

(51) Int. Cl. A61K 48/00; A61K 9/00; A61K 38/17; A61K 38/46; A61P 27/02; C07K 14/005; C12N 15/113; C12N 15/86

(52) U.S. Cl. CPC A61K 48/005; A61K 9/0048; A61K 38/1709; A61K 38/46; A61K 48/0075; A61P 27/02; C07K 14/005; C12N 15/113; C12N 15/86; C12Y 306/05005; C12N 2750/14122; C12N 2750/14143

(57) ABSTRACT

Provided herein are recombinant AAV vectors, AAV viral vectors, capsid proteins, and administration methods for improved gene therapy, and methods for their manufacture and use.

### CROSS-REFERENCE TO RELATED APPLICATIONS

[0001] This application claims the benefit of U.S. Provisional Application No. 63/189,836, filed May 18, 2021, U.S. Provisional Application No. 63/275,527, filed Nov. 4, 2021, and U.S. Provisional Application No. 63/334,949, filed Apr. 26, 2022, all of which are herein incorporated by reference in their entireties.

### INCORPORATION BY REFERENCE OF SEQUENCE LISTING

[0002] The contents of the text file submitted electronically herewith are incorporated herein by reference in their entirety: A computer readable format copy of the Sequence Listing (filename: ABEO_008_03WO_SeqList_ST25.TXT, date created: May 17, 2022, file size: about 636 kb).

### BACKGROUND

[0003] Adeno-associated viral vectors are promising delivery vectors for gene therapy. However, their therapeutic efficacy is undermined by the vectors' delivery route, delivery efficiency. Therefore, there is an urgent need for new strategies for delivering selected AAV viral vectors with a better therapeutic potential.

### SUMMARY

[0004] The present disclosure relates generally to the field of gene therapy and in particular, to recombinant adeno-associated viral (AAV) vector particles (also known as AAV viral vectors) with novel capsid proteins, their manufacture, their delivery methods, and their use to deliver transgenes to treat or prevent a disease or disorder.

[0005] In one aspect, the disclosure provides methods of treating an ophthalmic disease or disorder in a subject in need thereof, comprising para-retinal administration of an AAV viral vector to the subject, wherein the AAV viral vector comprises an AAV capsid protein comprising the amino acid sequence of SEQ ID NO: 2.

[0006] In one aspect, the disclosure provides methods of treating an ophthalmic disease or disorder in a subject in need thereof, comprising para-retinal administration of an AAV viral vector to the subject, wherein the AAV viral vector comprises an AAV capsid protein comprising or consisting of an amino acid sequence that is at least 95%, at least 98%, at least 99%, at least 99.5%, or 100% identical to any one of SEQ ID NO: 1-3, 30-34, 49, 67, 84, and 164.

[0007] In embodiments, the AAV viral vector comprises an AAV capsid protein comprising an amino acid sequence that is up to 1, 2, 3, 4, 5, 6, 7, 8, 9, or 10 amino acids different from any one of SEQ ID NO: 1-3, 30-34, 49, 67, 84 and 164. In embodiments, the AAV viral vector comprises an AAV capsid protein comprising or consisting of the amino acid sequence of SED ID NO: 2 or an amino acid sequence that is up to 1, 2, 3, 4, 5, 6, 7, 8, 9, or 10 amino acids different from SEQ ID NO: 2. In embodiments, the AAV capsid protein comprises a leucine (L) at amino acid 129 of SEQ ID NO: 2, an asparagine (N) at amino acid 586 of SEQ ID NO: 2, and a glutamic acid (E) at amino acid 723 of SEQ ID NO: 2. In embodiments, the AAV viral vector comprises an AAV capsid protein comprising or consisting of the amino acid sequence of SED ID NO: 1 or an amino acid sequence that is up to 2, 2, 3, 4, 5, 6, 7, 8, 9, or 10 amino acids different from SEQ ID NO: 1. In embodiments, the AAV capsid protein comprises a leucine (L) at amino acid 129, a proline (P) at amino acid 148, a arginine (R) at amino acid 152, a serine (S) at amino acid 153, a threonine (T) at amino acid 158, a lysine (K) at amino acid 163, a arginine (R) at amino acid 169, a tryptophan (W) at amino acid 306, a phenylalanine (F) at amino acid 308, and a asparagine (N) at amino acid 319, wherein the amino acid positions are numbered with respect to SEQ ID NO: 1. In embodiments, the AAV viral vector comprises an AAV capsid protein comprising or consisting of the amino acid sequence of SED ID NO: 164 or an amino acid sequence that is up to 1, 2, 3, 4, 5, 6, 7, 8, 9, or 10 amino acids different from SEQ ID NO: 164. In embodiments, the AAV viral vector comprises an AAV capsid protein comprising or consisting of the amino acid sequence of SED ID NO: 67 or an amino acid sequence that is up to 1, 2, 3, 4, 5, 6, 7, 8, 9, or 10 amino acids different from SEQ ID NO: 67. In embodiments, the AAV viral vector comprises an AAV capsid protein comprising or consisting of the amino acid sequence of SED ID NO: 3 or an amino acid sequence that is up to 2, 2, 3, 4, 5, 6, 7, 8, 9, or 10 amino acids different from SEQ ID NO: 3.

[0008] In embodiments, the AAV capsid protein comprises a VP3 portion comprising variable regions (VR) I to IX wherein:

(a) VR-II comprises amino acid sequence
(SEQ ID NO: 54)
DNNGVK,
(b) VR-III comprises amino acid sequence
(SEQ ID NO: 55)
NDGS,
(c) VR-IV comprises amino acid sequence
(SEQ ID NO: 56)
INGSGQNQQT
or
(SEQ ID NO: 171)
QSTGGTAGTQQ,
(d) VR-V comprises amino acid sequence
(SEQ ID NO: 57)
RVSTTTGQNNNSNFAWTA,
(e) VR-VI comprises amino acid sequence
(SEQ ID NO: 58)
HKEGEDRFFPLSG,
(f) VR-VII comprises amino acid sequence
(SEQ ID NO: 59)
KQNAARDNADYSDV,
(g) VR-VIII comprises amino acid sequence
(SEQ ID NO: 60)
ADNLQQQNTAPQI,
and
(h) VR-IX comprises amino acid sequence
(SEQ ID NO: 61)
NYYKSTSVDF.

[0009] In embodiments, the VR-I region comprises SASTGAS (SEQ ID NO. 52), NSTSGGSS (SEQ ID NO. 53), SSTSGGSS (SEQ ID NO. 87), or NGTSGGST (SEQ ID NO: 170).

[0010] In embodiments, wherein the ophthalmic disease or disorder is selected from the group consisting of dominant optic atrophy, retinitis pigmentosa, macular degeneration, an eye disorder related to mutations in the bestrophin-1 (BEST-1) gene, Leber congenital amaurosis, cone-rod dystrophy, Stargardt disease, choroideremia, Usher Syndrome, retinoschisis, Bietti's Crystalline Dystrophy and Achromatopsia. In embodiments, the retinitis pigmentosa is autosomal recessive, autosomal dominant, or X-linked. In embodiments, the eye disorder related to mutations in the BEST-1 gene is vitelliform macular dystrophy, age-related macular degeneration, autosomal dominant vitreoretinochoroidopathy, glaucoma, or cataract. In embodiments, the AAV viral vector comprises an AAV vector genome encoding a gene selected from SPATA7, LRAT, TULP1, AIPL1, RPGR, AIPL1, ABCA4, CHM, MY07A, CDH23, USH2A, CLRN1, RS1, CYP4V2, CNGA3, CNGB3, GNAT2, RHO, PDE6B, PDE6C, PDE6H, OPA1, OPA3, and BEST-1. In embodiments, the AAV viral vector comprises an AAV vector encoding an antisense RNA, microRNA, siRNA, or guide RNA (gRNA). In embodiments, the ophthalmic disease or disorder is related to a dysfunction of optic nerve.

[0011] In embodiments, the ophthalmic disease or disorder is Dominant Optic Atrophy. In embodiments, the AAV viral vector comprises an AAV vector genome comprising an OPA1 or OPA3 transgene.

[0012] In embodiments, the ophthalmic disease or disorder is Retinoschisis. In embodiments, the AAV viral vector comprises an AAV vector genome comprising a RS1 transgene.

[0013] In embodiments, the para-retinal administration comprises injecting at a distance of between 0-13 millimeters (mm), between 0-10 mm, between 0-5 mm, or between 0-3 mm, from the surface of the retina in the posterior vitreous cavity of the eye. In embodiments, the para-retinal administration comprises injecting at a distance of between 0-13 mm from the surface of the retina in the posterior vitreous cavity. In embodiments, the para-retinal administration comprises injecting at a distance of between 0-10 mm from the surface of the retina in the posterior vitreous cavity. In embodiments, the para-retinal administration comprises injecting at a distance of between 0-5 mm from the surface of the retina in the posterior vitreous cavity. In embodiments, the para-retinal administration comprises injecting at a distance of between 0-3 mm from the surface of the retina in the posterior vitreous cavity.

[0014] In embodiments, the subject is a human.

[0015] In one aspect, the disclosure provides nucleic acids encoding an AAV capsid protein comprising a VP3 portion, wherein the VP3 portion comprises variable regions (VR) I to IX wherein:

(a) VR-II comprises amino acid sequence
(SEQ ID NO: 54)
DNNGVK,
(b) VR-III comprises amino acid sequence
(SEQ ID NO: 55)
NDGS,
(c) VR-IV comprises amino acid sequence
(SEQ ID NO: 171)
QSTGGTAGTQQ,
(d) VR-V comprises amino acid sequence
(SEQ ID NO: 57)
RVSTTTGQNNNSNFAWTA,
(e) VR-VI comprises amino acid sequence
(SEQ ID NO: 58)
HKEGEDRFFPLSG,
(f) VR-VII comprises amino acid sequence
(SEQ ID NO: 59)
KQNAARDNADYSDV,
(g) VR-VIII comprises amino acid sequence
(SEQ ID NO: 60)
ADNLQQQNTAPQI,
and
(h) VR-IX comprises amino acid sequence
(SEQ ID NO: 61)
NYYKSTSVDF.

In embodiments, the VR-I region comprises NGTSGGST (SEQ ID NO: 170). In embodiments, the VP3 portion has the amino acid sequence of SEQ ID NO: 166. In embodiments, the AAV capsid protein further comprises i) a VP2 portion or ii) a VP1 portion and a VP2 portion.

[0016] In embodiments, the encoded AAV capsid protein comprises an amino acid sequence at least 95%, at least 96%, at least 97%, at least 98%, at least 99%, or 100% identical to SEQ ID NO: 164 or an amino acid sequence having up to 1, 2, 3, 4, 5, 6, 7, 8, 9, or 10 amino acids different from SEQ ID NO: 164. In embodiments, the encoded AAV capsid protein comprises an amino acid sequence at least 95%, at least 96%, at least 97%, at least 98%, at least 99%, or 100% identical to SEQ ID NO: 165 or an amino acid sequence having up to 1, 2, 3, 4, 5, 6, 7, 8, 9, or 10 amino acids different from SEQ ID NO: 165. In embodiments, the encoded AAV capsid protein comprises an amino acid sequence at least 95%, at least 96%, at least 97%, at least 98%, at least 99%, or 100% identical to SEQ ID NO: 166 or an amino acid sequence having up to 1, 2, 3, 4, 5, 6, 7, 8, 9, or 10 amino acids different from SEQ ID NO: 166. In embodiments, the nucleic acid sequence is at least 95% identical to the nucleotide sequence selected from SEQ ID NOs: 167-169. In embodiments, the nucleic acid sequence is 100% identical to the nucleotide sequence selected from SEQ ID NOs: 167-169.

[0017] In one aspect, the disclosure provides vectors comprising the nucleic acid of the disclosure.

[0018] In one aspect, the disclosure provides AAV capsid proteins encoded by the nucleic acid of the disclosure. In embodiments, the protein comprises the amino acid sequence of SEQ ID NO: 164, 165 or 166, or an amino acid sequence having up to 1, 2, 3, 4, 5, 6, 7, 8, 9, or 10 amino acids different from SEQ ID NO: 164, 165 or 166.

[0019] In one aspect, the disclosure provides AAV viral vectors comprising the AAV capsid protein encoded by the nucleic acid of the disclosure and an AAV vector genome, wherein the AAV vector genome comprises, in 5′ to 3′ orientation:
[0020] (a) a first AAV inverted terminal repeat,
[0021] (b) a promoter,
[0022] (c) a heterologous nucleic acid,
[0023] (d) a polyadenylation signal, and
[0024] (e) a second AAV inverted terminal repeat.

[0025] In embodiments, the heterologous nucleic acid is operably linked to a constitutive promoter. In embodiments, the heterologous nucleic acid encodes a polypeptide. In embodiments, the heterologous nucleic acid encodes an antisense RNA, an siRNA, a microRNA, or a gRNA. In embodiments, the AAV capsid protein comprises the amino acid sequence of SEQ ID NO: 164, 165 or 166.

[0026] In one aspect, the disclosure provides AAV viral vectors comprising
[0027] (i) an AAV capsid protein having the amino acid sequence of SEQ ID NO: 164 and
[0028] (ii) an AAV vector genome, wherein the AAV vector genome comprises, in 5′ to 3′ orientation:
   [0029] (a) a first AAV inverted terminal repeat,
   [0030] (b) a promoter,
   [0031] (c) a heterologous nucleic acid,
   [0032] (d) a polyadenylation signal; and
   [0033] (e) a second AAV inverted terminal repeat.

[0034] In embodiments, the heterologous nucleic acid encodes a polypeptide having at least 90% identity to any one of SEQ ID NOs: 142-144 and 177-181. In embodiments, the heterologous nucleic acid comprises a polynucleotide sequence having at least 90% identity to any one of SEQ ID NOs: 116-118 and 172-176.

[0035] In one aspect, the disclosure provides methods of treating a disease or disorder comprising administering the AAV viral vector of the disclosure to a subject. In embodiments, the AAV viral vector is administered to the subject orally, rectally, transmucosally, inhalationally, transdermally, parenterally, intravenously, subcutaneously, intradermally, intramuscularly, intrapleurally, intracerebrally, intrathecally, intracerebrally, intraventricularly, intranasally, intra-aurally, intra-ocularly, peri-ocularly, topically, intralymphatically, intracistemally, intravitreally, para-retinally, or sub-retinally. In embodiments, the disease or disorder is amyotrophic lateral sclerosis (ALS), spinal muscular atrophy (SMA), Fabry disease, Pompe disease, CLN3 disease (or Juvenile Neuronal Ceroid Lipofuscinosis), recessive dystrophic epidermolysis bullosa (RDEB), juvenile Batten disease, autosomal dominant disorder, muscular dystrophy, hemophilia A, hemophilia B, multiple sclerosis, diabetes mellitus, Gaucher disease cancer, arthritis, muscle wasting, heart disease, intimal hyperplasia, epilepsy, Huntington's disease, Parkinson's disease, Alzheimer's disease, cystic fibrosis, thalassemia, Hurler's Syndrome, Sly syndrome, Scheie Syndrome, Hurler-Scheie Syndrome, Hunter's Syndrome, Sanfilippo Syndrome A (mucopolysaccharidosis IIIA or MPS IIIA), Sanfilippo Syndrome B (mucopolysaccharidosis IIIB or MPS IIIB), Sanfilippo Syndrome C, Sanfilippo Syndrome D, Morquio Syndrome, Maroteaux-Lamy Syndrome, Krabbe's disease, phenylketonuria, Batten's disease, spinal cerebral ataxia, LDL receptor deficiency, hyperammonemia, arthritis, macular degeneration, retinitis pigmentosa, ceroid lipofuscinosis, neuronal, 1 (CLN1), adenosine deaminase deficiency, Dominant Optic Atrophy, Retinoschisis, Stargardt disease, Bietti's Crystalline Dystrophy or BEST vitelliform macular dystrophy. In embodiments, the diseases or disorder is an ophthalmic disease or disorder. In embodiments, the ophthalmic disease or disorder is selected from the group consisting of dominant optic atrophy, retinitis pigmentosa, macular degeneration, an eye disorder related to mutations in the bestrophin-1 (BEST-1) gene, Leber congenital amaurosis, cone-rod dystrophy, Stargardt disease, choroideremia, Usher Syndrome, retinoschisis, Bietti's Crystalline Dystrophy and Achromatopsia. In embodiments, the subject is a human.

### BRIEF DESCRIPTION OF THE DRAWINGS

[0036] FIG. 1 is an illustration of the various modes of intraocular administrations. Adapted from Yiu et al., Mol Ther Methods Clin Dev. 2020 Jan. 21; 16:179-191, the content of which is incorporated by reference herein in its entirety.

[0037] FIGS. 2A-2E show AAV viral vector-mediated GFP expression in the eyes of a non-human primate animal model via intravitreal or para-retinal administrations. Scanning laser ophthalmoscopy (SLO) imaging was performed at Day 26 after injection of the indicated AAV viral vector. FIG. 2A shows transduction spread mediated by intravitreal injection of AAV viral vector comprising AAV204 capsid protein. FIG. 2B shows transduction spread mediated by para-retinal injection of AAV viral vector comprising AAV204 capsid protein. FIG. 2C shows transduction spread mediated by para-retinal injection of AAV viral vector comprising AAV8 capsid protein. FIG. 2D shows transduction spread mediated by para-retinal injection of AAV viral vector comprising AAV214 capsid protein. FIG. 2E shows transduction spread mediated by para-retinal injection of AAV viral vector comprising AAV214-D5 capsid protein.

[0038] FIGS. 3A-3F show imaging analysis of retinas after AAV administration. FIG. 3A shows the composite images of retina after AAV204 intravitreal administration. FIG. 3B shows the composite (upper left), rhodopsin (upper right), and zoom-in composite (lower) images of retina after AAV204 para-retinal administration. FIG. 3C shows the composite (upper left), rhodopsin (upper right), and zoom-in composite (lower) images of retina after AAV204 para-retinal administration. FIG. 3D shows the immunohistochemistry analysis of rhodopsin and GFP expression 1-month post para-retinal injection of AAV204 or AAV8 viral vector. FIG. 3E shows rhodopsin and GFP expression in the fovea post para-retinal injection of AAV204 viral vector. FIG. 3F shows rhodopsin and GFP expression along the papillomacular bundle post para-retinal injection of AAV204 viral vector.

[0039] FIGS. 4A-4C show AAV viral vector-mediated GFP expression in the eyes of a non-human primate animal model via sub-retinal administration. SLO imaging was performed at Day 27 after injection of the indicated AAV viral vector. FIG. 4A shows transduction spread mediated by sub-retinal injection of AAV viral vector comprising AAV8 capsid protein. FIG. 4B shows transduction spread mediated by sub-retinal injection of AAV viral vector comprising AAV214 capsid protein. FIG. 4C shows transduction spread mediated by sub-retinal injection of AAV viral vector comprising AAV214-D5 capsid protein. FIG. 4D shows the composite (upper left), rhodopsin (upper right), and zoom-in composite (lower) images of retina after AAV8 subretinal administration. FIG. 4E shows the composite (upper left), rhodopsin (upper right), and zoom-in composite (lower) images of retina after AAV214 subretinal administration. FIG. 4F shows the composite (upper left), rhodopsin (upper right), and zoom-in composite (lower) images of retina after AAV214-D5 subretinal administration.

[0040] FIG. 5 shows a diagram of the VP1, VP2, and VP3 portions of the capsid protein. The VP1- and VP2-specific portions are indicated along with the VP3 portion, which is identical to the VP3 protein produced. The amino acid sequence of AAV214 VP3 (SEQ ID NO: 41) is shown and variable regions I-IX are indicated. The full VP1 protein amino acid sequence for AAV214 is provided as SEQ ID NO: 3.

[0041] FIG. 6 shows an alignment of the VP1 protein amino acid sequences of AAV214 (SEQ ID NO: 3) and AAV214-D5 (SEQ ID NO: 164).

### DETAILED DESCRIPTION

[0042] Some embodiments according to the present disclosure will be described more fully hereinafter. Aspects of the disclosure may, however, be embodied in different forms and should not be construed as limited to the embodiments set forth herein. Rather, these embodiments are provided so that this disclosure will be thorough and complete, and will fully convey the scope of the invention to those skilled in the art. The terminology used in the description herein is for the purpose of describing particular embodiments only and is not intended to be limiting.

[0043] Unless otherwise defined, all terms (including technical and scientific terms) used herein have the same meaning as commonly understood by one of ordinary skill in the art to which this invention belongs. It will be further understood that terms, such as those defined in commonly used dictionaries, should be interpreted as having a meaning that is consistent with their meaning in the context of the present application and relevant art and should not be interpreted in an idealized or overly formal sense unless expressly so defined herein.

[0044] Unless the context indicates otherwise, it is specifically intended that the various features of the invention described herein can be used in any combination. Moreover, the disclosure also contemplates that in embodiments, any feature or combination of features set forth herein can be excluded or omitted. To illustrate, if the specification states that a complex comprises components A, B and C, it is specifically intended that any of A, B or C, or a combination thereof, can be omitted and disclaimed singularly or in any combination.

[0045] Unless explicitly indicated otherwise, all specified embodiments, features, and terms intend to include both the recited embodiment, feature, or term and biological equivalents thereof.

### INCORPORATION BY REFERENCE

[0046] All references, articles, publications, patents, patent publications, and patent applications cited herein are incorporated by reference in their entireties for all purposes. However, mention of any reference, article, publication, patent, patent publication, and patent application cited herein is not, and should not, be taken as an acknowledgment or any form of suggestion that they constitute valid prior art or form part of the common general knowledge in any country in the world.

### Definitions

[0047] The practice of the present technology will employ, unless otherwise indicated, conventional techniques of organic chemistry, pharmacology, immunology, molecular biology, microbiology, cell biology and recombinant DNA, which are within the skill of the art. See, e.g., Sambrook, Fritsch and Maniatis, Molecular Cloning: A Laboratory Manual, 2nd edition (1989); Current Protocols in Molecular Biology (F. M. Ausubel, et al. eds., (1987)); the series Methods in Enzymology (Academic Press, Inc.): PCR 2: A Practical Approach (M. J. MacPherson, B. D. Hames and G. R. Taylor eds. (1995)), Harlow and Lane, eds. (1988) Antibodies, a Laboratory Manual, and Animal Cell Culture (RI. Freshney, ed. (1987)).

[0048] It also is to be understood, although not always explicitly stated, that the reagents described herein are merely exemplary and that equivalents of such are known in the art.

[0049] The term “about,” as used herein when referring to a measurable value such as an amount or concentration and the like, is meant to encompass variations of 10% of the specified amount.

[0050] The terms “acceptable”, “effective”, or “sufficient” when used to describe the selection of any components, ranges, dose forms, etc. disclosed herein intend that said component, range, dose form, etc. is suitable for the disclosed purpose.

[0051] Unless specifically recited, the term “host cell” includes a eukaryotic host cell, including, for example, fungal cells, yeast cells, higher plant cells, insect cells and mammalian cells. Non-limiting examples of eukaryotic host cells include simian, bovine, porcine, murine, rat, avian, reptilian and human, e.g., HEK293 cells and 293T cells.

[0052] The term “isolated” as used herein refers to molecules or biologicals or cellular materials being substantially free from other materials.

[0053] As used herein, the terms “nucleic acid sequence” and “polynucleotide” are used interchangeably to refer to a polymeric form of nucleotides of any length, either ribonucleotides or deoxyribonucleotides. Thus, this term includes, but is not limited to, single-, double-, or multi-stranded DNA or RNA, genomic DNA, cDNA, DNA-RNA hybrids, or a polymer comprising, consisting essentially of, or consisting of purine and pyrimidine bases or other natural, chemically or biochemically modified, non-natural, or derivatized nucleotide bases.

[0054] A “gene” refers to a polynucleotide containing at least one open reading frame (ORF) that is capable of encoding a particular polypeptide or protein. A “gene product” or, alternatively, a “gene expression product” refers to the amino acid sequence (e.g., peptide or polypeptide) generated when a gene is transcribed and translated.

[0055] As used herein, “expression” refers to the two-step process by which polynucleotides are transcribed into mRNA and/or the process by which the transcribed mRNA is subsequently translated into peptides, polypeptides, or proteins. If the polynucleotide is derived from genomic DNA, expression may include splicing of the mRNA in a eukaryotic cell.

[0056] “Under transcriptional control” is a term well understood in the art and indicates that transcription of a polynucleotide sequence, usually a DNA sequence, depends on its being operatively linked to an element that contributes to the initiation of, or promotes, transcription. “Operatively linked” intends that the polynucleotides are arranged in a manner that allows them to function in a cell. In one aspect, this invention provides promoters operatively linked to the downstream sequences.

[0057] The term “encode” as it is applied to polynucleotides refers to a polynucleotide which is said to “encode” a polypeptide if, in its native state or when manipulated by methods well known to those skilled in the art, it can be transcribed to produce the mRNA for the polypeptide and/or a fragment thereof. The antisense strand is the complement of such a nucleic acid, and the encoding sequence can be deduced therefrom.

[0058] The term “promoter” as used herein means a control sequence that is a region of a polynucleotide sequence at which the initiation and rate of transcription of a coding sequence, such as a gene or a transgene, are controlled. Promoters may be constitutive, inducible, repressible, or tissue-specific, for example. Promoters may contain genetic elements at which regulatory proteins and molecules such as RNA polymerase and transcription factors may bind. Non-limiting exemplary promoters include Rous sarcoma virus (RSV) LTR promoter (optionally with the RSV enhancer), a cytomegalovirus (CMV) promoter, an SV40 promoter, a dihydrofolate reductase promoter, a β-actin promoter, a phosphoglycerol kinase (PGK) promoter, a U6 promoter, an H1 promoter, a ubiquitous chicken β-actin hybrid (CBh) promoter, a small nuclear RNA (U1a or U1b) promoter, an MeCP2 promoter, an MeP418 promoter, an MeP426 promoter, a minimal MeCP2 promoter, a VMD2 promoter, an mRho promoter or an EFI promoter.

[0059] Additional non-limiting exemplary promoters provided herein include, but are not limited to EF1a, Ubc, human β-actin, CAG, TRE, Ac5, Polyhedrin, CaMKIIa, Gal1, TEF1, GDS, ADH1, Ubi, and α-1-antitrypsin (hAAT). It is known in the art that the nucleotide sequences of such promoters may be modified in order to increase or decrease the efficiency of mRNA transcription. See, e.g., Gao et al. (2018) Mol. Ther.: Nucleic Acids 12:135-145 (modifying TATA box of 7SK, U6 and H1 promoters to abolish RNA polymerase III transcription and stimulate RNA polymerase II-dependent mRNA transcription). Synthetically-derived promoters may be used for ubiquitous or tissue specific expression. Further, virus-derived promoters, some of which are noted above, may be useful in the methods disclosed herein, e.g., CMV, HIV, adenovirus, and AAV promoters. In embodiments, the promoter is used together with an enhancer to increase the transcription efficiency. Non-limiting examples of enhancers include an interstitial retinoid-binding protein (IRBP) enhancer, an RSV enhancer or a CMV enhancer.

[0060] An enhancer is a regulatory element that increases the expression of a target sequence. A “promoter/enhancer” is a polynucleotide that contains sequences capable of providing both promoter and enhancer functions. For example, the long terminal repeats of retroviruses contain both promoter and enhancer functions. The enhancer/promoter may be “endogenous” or “exogenous” or “heterologous.” An “endogenous” enhancer/promoter is one which is naturally linked with a given gene in the genome. An “exogenous” or “heterologous” enhancer/promoter is one which is placed in juxtaposition to a gene by means of genetic manipulation (i.e., molecular biological techniques) such that transcription of that gene is directed by the linked enhancer/promoter. Non-limiting examples of linked enhancer/promoter for use in the methods, compositions and constructs provided herein include a PDE promoter plus IRBP enhancer or a CMV enhancer plus U1a promoter. It is understood in the art that enhancers can operate from a distance and irrespective of their orientation relative to the location of an endogenous or heterologous promoter. It is thus further understood that an enhancer operating at a distance from a promoter is thus “operably linked” to that promoter irrespective of its location in the vector or its orientation relative to the location of the promoter.

[0061] The term “protein”, “peptide” and “polypeptide” are used interchangeably and in their broadest sense to refer to a compound of two or more subunits of amino acids, amino acid analogs or peptidomimetics. The subunits may be linked by peptide bonds. In another aspect, the subunit may be linked by other bonds, e.g., ester, ether, etc. A protein or peptide must contain at least two amino acids and no limitation is placed on the maximum number of amino acids which may comprise, consist essentially of, or consist of a protein's or peptide's sequence. As used herein the term “amino acid” refers to either natural and/or unnatural or synthetic amino acids, including glycine and both the D and L optical isomers, amino acid analogs and peptidomimetics.

[0062] As used herein, the term “signal peptide” or “signal polypeptide” intends an amino acid sequence usually present at the N-terminal end of newly synthesized secretory or membrane polypeptides or proteins. It acts to direct the polypeptide to a specific cellular location, e.g. across a cell membrane, into a cell membrane, or into the nucleus. In embodiments, the signal peptide is removed following localization. Examples of signal peptides are well known in the art. Non-limiting examples are those described in U.S. Pat. Nos. 8,853,381, 5,958,736, and 8,795,965. In embodiments, the signal peptide can be an IDUA signal peptide.

[0063] The terms “equivalent” or “biological equivalent” are used interchangeably when referring to a particular molecule, biological material, or cellular material and intend those having minimal homology while still maintaining desired structure or functionality. Non-limiting examples of equivalent polypeptides include a polypeptide having at least about 60%, at least about 65%, at least about 70%, at least about 75%, at least about 80%, at least about 85%, at least about 90%, at least about 95% identity or at least about 99% identity to a reference polypeptide (for instance, a wild-type polypeptide); or a polypeptide which is encoded by a polynucleotide having at least about 70%, at least about 75%, at least about 80%, at least about 85%, at least about 90%, at least about 95% identity, at least about 97% sequence identity or at least about 99% sequence identity to the reference polynucleotide (for instance, a wild-type polynucleotide).

[0064] “Homology” or “identity” or “similarity” refers to sequence similarity between two peptides or between two nucleic acid molecules. Percent identity can be determined by comparing a position in each sequence that may be aligned for purposes of comparison. When a position in the compared sequence is occupied by the same base or amino acid, then the molecules are identical at that position. A degree of identity between sequences is a function of the number of matching positions shared by the sequences. “Unrelated” or “non-homologous” sequences share less than 40% identity, less than 25% identity, with one of the sequences of the present disclosure. Alignment and percent sequence identity may be determined for the nucleic acid or amino acid sequences provided herein by importing said nucleic acid or amino acid sequences into and using ClustalW (available at https://genome.jp/tools-bin/clustalw/) and Gonnet (for protein) weight matrix. In embodiments, the ClustalW parameters used for performing nucleic acid sequence alignments using the nucleic acid sequences found herein are generated using the ClustalW (for DNA) weight matrix.

[0065] As used herein, amino acid modifications may be substitutions, deletions or insertions. Amino acid substitutions may be conservative amino acid substitutions or non-conservative amino acid substitutions. A conservative replacement (also called a conservative mutation, a conservative substitution or a conservative variation) is an amino acid replacement in a protein that changes a given amino acid to a different amino acid with similar biochemical properties (e.g., charge, hydrophobicity or size). As used herein, “conservative variations” refer to the replacement of an amino acid residue by another, biologically similar residue. Examples of conservative variations include the substitution of one hydrophobic residue such as isoleucine, valine, leucine or methionine for another; or the substitution of one charged or polar residue for another, such as the substitution of arginine for lysine, glutamic acid for aspartic acid, glutamine for asparagine, and the like. Other illustrative examples of conservative substitutions include the changes of: alanine to serine; asparagine to glutamine or histidine; aspartate to glutamate; cysteine to serine; glycine to proline; histidine to asparagine or glutamine; lysine to arginine, glutamine, or glutamate; phenylalanine to tyrosine, serine to threonine; threonine to serine; tryptophan to tyrosine; tyrosine to tryptophan or phenylalanine; and the like.

[0066] As used herein, the term “vector” refers to a nucleic acid comprising, consisting essentially of, or consisting of an intact replicon such that the vector may be replicated when placed within a cell, for example by a process of transfection, infection, or transformation. It is understood in the art that once inside a cell, a vector may replicate as an extrachromosomal (episomal) element or may be integrated into a host cell chromosome. Vectors may include nucleic acids derived from retroviruses, adenoviruses, herpesvirus, baculoviruses, modified baculoviruses, papovaviruses, or otherwise modified naturally-occurring viruses. Exemplary non-viral vectors for delivering nucleic acid include naked DNA; DNA complexed with cationic lipids, alone or in combination with cationic polymers; anionic and cationic liposomes; DNA-protein complexes and particles comprising, consisting essentially of, or consisting of DNA condensed with cationic polymers such as heterogeneous polylysine, defined-length oligopeptides, and polyethyleneimine, in some cases contained in liposomes; and the use of ternary complexes comprising, consisting essentially of, or consisting of a virus and polylysine-DNA.

[0067] With respect to general recombinant techniques, vectors that contain both a promoter and a cloning site into which a polynucleotide can be operatively linked are well known in the art. Such vectors are capable of transcribing RNA in vitro or in vivo, and are commercially available from sources such as Agilent Technologies (Santa Clara, Calif) and Promega Biotech (Madison, Wis.). In order to optimize expression and/or in vitro transcription, it may be necessary to remove, add or alter 5′ and/or 3′ untranslated portions of cloned transgenes to eliminate extra, potential inappropriate alternative translation initiation codons or other sequences that may interfere with or reduce expression, either at the level of transcription or translation. Alternatively, consensus ribosome binding sites can be inserted immediately 5′ of the start codon to enhance expression.

[0068] A “viral vector” is defined as a recombinantly produced virus or viral particle that contains a polynucleotide to be delivered into a host cell, either in vivo, ex vivo or in vitro. Examples of viral vectors include retroviral vectors, AAV viral vectors, lentiviral vectors, adenovirus vectors, alphavirus vectors and the like. Alphavirus vectors, such as Semliki Forest virus-based vectors and Sindbis virus-based vectors, have also been developed for use in gene therapy and immunotherapy. See, e.g., Schlesinger and Dubensky (1999) Curr. Opin. Biotechnol. 5:434-439 and Ying, et al. (1999) Nat. Med. 5(7):823-827.

[0069] As used herein, the term “recombinant expression system” or “recombinant vector” refers to a genetic construct or constructs for the expression of certain genetic material formed by recombination.

[0070] A “gene delivery vehicle” is defined as any molecule that can carry inserted polynucleotides into a host cell. Examples of gene delivery vehicles are liposomes, micelles biocompatible polymers, including natural polymers and synthetic polymers; lipoproteins; polypeptides; polysaccharides; lipopolysaccharides; artificial viral envelopes; metal particles; bacteria; viruses, such as baculoviruses, adenoviruses and retroviruses; bacteriophage, cosmid, plasmid, and fungal vectors; and other recombination vehicles typically used in the art which have been described for expression in a variety of eukaryotic and prokaryotic hosts, and may be used for gene therapy as well as for simple protein expression. Liposomes that also comprise, consist essentially of, or consist of a targeting antibody or fragment thereof can be used in the methods disclosed herein. In addition to the delivery of polynucleotides to a cell or cell population, direct introduction of the proteins described herein to the cell or cell population can be done by the non-limiting technique of protein transfection, alternatively culturing conditions that can enhance the expression and/or promote the activity of the proteins disclosed herein are other non-limiting techniques.

[0071] A polynucleotide disclosed herein can be delivered to a cell or tissue using a gene delivery vehicle. “Gene delivery,” “gene transfer,” “transducing,” and the like as used herein, are terms referring to the introduction of an exogenous polynucleotide (sometimes referred to as a “transgene”) into a host cell, irrespective of the method used for the introduction. Such methods include a variety of well-known techniques such as vector-mediated gene transfer (by, e.g., viral infection/transfection, or various other protein-based or lipid-based gene delivery complexes) as well as techniques facilitating the delivery of “naked” polynucleotides (such as electroporation, “gene gun” delivery and various other techniques used for the introduction of polynucleotides). The introduced polynucleotide may be stably or transiently maintained in the host cell. Stable maintenance typically requires that the introduced polynucleotide either contains an origin of replication compatible with the host cell or integrates into a replicon of the host cell such as an extrachromosomal replicon (e.g., a plasmid) or a nuclear or mitochondrial chromosome. A number of vectors are known to be capable of mediating transfer of genes to mammalian cells, as is known in the art and described herein.

[0072] A “plasmid” is a DNA molecule that is typically separate from and capable of replicating independently of the chromosomal DNA. In many cases, it is circular and double-stranded. Plasmids provide a mechanism for horizontal gene transfer within a population of microbes and typically provide a selective advantage under a given environmental state. Plasmids may carry genes that provide resistance to naturally occurring antibiotics in a competitive environmental niche, or, alternatively, the proteins produced may act as toxins under similar circumstances. It is known in the art that while plasmid vectors often exist as extrachromosomal circular DNA molecules, plasmid vectors may also be designed to be stably integrated into a host chromosome either randomly or in a targeted manner, and such integration may be accomplished using either a circular plasmid or a plasmid that has been linearized prior to introduction into the host cell.

[0073] “Plasmids” used in genetic engineering are called “plasmid vectors”. Many plasmids are commercially available for such uses. The gene to be replicated is inserted into copies of a plasmid containing genes that make cells resistant to particular antibiotics, and a multiple cloning site (MCS, or polylinker), which is a short region containing several commonly used restriction sites allowing the easy insertion of DNA fragments at this location. Another major use of plasmids is to make large amounts of proteins. In this case, researchers grow bacteria or eukaryotic cells containing a plasmid harboring the gene of interest, which can be induced to produce large amounts of proteins from the inserted gene.

[0074] In aspects where gene transfer is mediated by a DNA viral vector, such as an adenovirus (Ad) or adeno-associated virus (AAV), a vector construct refers to the polynucleotide comprising, consisting essentially of, or consisting of the viral genome or part thereof, and a transgene.

[0075] The term “adeno-associated virus” or “AAV” as used herein refers to a member of the class of viruses associated with this name and belonging to the genus Dependoparvovirus, family Parvoviridae. Adeno-associated virus is a single-stranded DNA virus that grows only in cells in which certain functions are provided by a co-infecting helper virus. General information and reviews of AAV can be found in, for example, Carter, 1989, Handbook of Parvoviruses, Vol. 1, pp. 169-228, and Berns, 1990, Virology, pp. 1743-1764, Raven Press, (New York). It is fully expected that the same principles described in these reviews will be applicable to additional AAV serotypes characterized after the publication dates of the reviews because it is well known that the various serotypes are quite closely related, both structurally and functionally, even at the genetic level. (See, for example, Blacklowe, 1988, pp. 165-174 of Parvoviruses and Human Disease, J. R. Pattison, ed.; and Rose, Comprehensive Virology 3: 1-61 (1974)). For example, all AAV serotypes apparently exhibit very similar replication properties mediated by homologous rep genes; and all bear three related capsid proteins such as those expressed in AAV2. The degree of relatedness is further suggested by heteroduplex analysis which reveals extensive cross-hybridization between serotypes along the length of the genome; and the presence of analogous self-annealing segments at the termini that correspond to “inverted terminal repeat sequences” (ITRs). The similar infectivity patterns also suggest that the replication functions in each serotype are under similar regulatory control. Multiple serotypes of this virus are known to be suitable for gene delivery; all known serotypes can infect cells from various tissue types. At least 11 sequentially numbered AAV serotypes are known in the art. Non-limiting exemplary serotypes useful in the methods disclosed herein include any of the 11 serotypes, e.g., AAV2, AAV8, AAV9, or variant serotypes, e.g., AAV-DJ and AAV PHP.B. The AAV particle comprises, consists essentially of, or consists of three major viral proteins: VP1, VP2 and VP3. In embodiments, the AAV refers to the serotype AAV1, AAV2, AAV4, AAV5, AAV6, AAV7, AAV8, AAV9, AAV10, AAV11, AAV12, AAV13, AAVPHP.B, or AAVrh74.

[0076] An “AAV vector” as used herein refers to a vector comprising one or more heterologous nucleic acid (HNA) sequences and one or more AAV inverted terminal repeat sequences (ITRs). Such AAV vectors can be replicated when present in a host cell that provides the functionality of rep and cap gene products, and allow the ITRs and the nucleic acid between the ITRs to be packaged into infectious viral particles. In embodiments, AAV vectors comprise a promoter, at least one nucleic acid that may encode at least one protein or RNA, and/or an enhancer and/or a terminator within the flanking ITRs that is packaged into the infectious AAV particle. The ITRs and the nucleic acid between the ITRs can be encapsidated into the AAV capsid, and this encapsidated portion of the nucleic acid may be referred to as the “AAV vector genome.” AAV vectors may contain elements in addition to the encapsidated portion, for example, antibiotic resistance genes or other elements known in the art included in the plasmid for manufacturing purposes but not packaged into the AAV particle.

[0077] As used herein, the term “viral capsid” or “capsid” refers to the proteinaceous shell or coat of a viral particle. Capsids function to encapsidate, protect, transport, and release into the host cell a viral genome. Capsids are generally comprised of oligomeric structural subunits of protein (“capsid proteins”). As used herein, the term “encapsidated” means enclosed within a viral capsid. The viral capsid of AAV is composed of a mixture of three viral capsid proteins: VP1, VP2, and VP3. The mixture of VP1, VP2 and VP3 contains 60 monomers that are arranged in a T=1 icosahedral symmetry in a ratio of 1:1:10 (VP1:VP2:VP3) or 1:1:20 (VP1:VP2:VP3) as described in Sonntag F et al., (June 2010). “A viral assembly factor promotes AAV2 capsid formation in the nucleolus”. Proceedings of the National Academy of Sciences of the United States of America. 107 (22): 10220-5, and Rabinowitz J E, Samulski R J (December 2000). “Building a better vector: the manipulation of AAV virions”. Virology. 278 (2): 301-8, each of which is incorporated herein by reference in its entirety.

[0078] An “AAV virion” or “AAV viral particle” or “AAV viral vector” or “AAV vector particle” or “AAV particle” refers to a viral particle composed of at least one AAV capsid protein and an encapsidated AAV vector genome.

[0079] As used herein, the term “helper” in reference to a virus or plasmid refers to a virus or plasmid used to provide the additional components necessary for replication and packaging of any one of the AAV vector genomes disclosed herein. The components encoded by a helper virus may include any genes required for virion assembly, encapsidation, genome replication, and/or packaging. For example, the helper virus or plasmid may encode necessary enzymes for the replication of the viral genome. Non-limiting examples of helper viruses and plasmids suitable for use with AAV constructs include pHELP (plasmid), adenovirus (virus), or herpesvirus (virus). In embodiments, the pHELP plasmid may be the pHELPK plasmid, wherein the ampicillin expression cassette is exchanged with a kanamycin expression cassette; pHELPK has the sequence shown in SEQ ID NO: 92.

[0080] As used herein, a packaging cell (or a helper cell) is a cell used to produce viral vectors. Producing recombinant AAV viral vectors requires Rep and Cap proteins provided in trans as well as gene sequences from Adenovirus that help AAV replicate. In some aspects, Packaging/helper cells contain a plasmid is stably incorporated into the genome of the cell. In other aspects, the packaging cell may be transiently transfected. Typically, a packaging cell is a eukaryotic cell, such as a mammalian cell or an insect cell.

[0081] As used herein, a reporter protein is a detectable protein that is operably linked to a promoter to assay the expression (for example, tissue specificity and/or strength) of the promoter. In aspects, a reporter protein may be operably linked to a polypeptide. In aspects, reporter proteins may be used in monitoring DNA delivery methods, functional identification and characterization of promoter and enhancer elements, translation and transcription regulation, mRNA processing and protein: protein interactions. Non-limiting examples of a reporter protein are β-galactosidase; a fluorescent protein, such as, Green Fluorescent Protein (GFP) or Red Fluorescent Protein (RFP); luciferase; glutathione S-transferase; and maltose binding protein.

[0082] A “pharmaceutical composition” is intended to include the combination of an active ingredient—such as a polypeptide, a polynucleotide, an antibody or a viral vector—and a carrier, inert or active such as a solid support, making the composition suitable for diagnostic or therapeutic use in vitro, in vivo or ex vivo.

[0083] As used herein, the term “pharmaceutically acceptable carrier” encompasses any of the standard pharmaceutical carriers, such as a phosphate buffered saline solution, water, and emulsions, such as an oil/water or water/oil emulsion, and various types of wetting agents. The compositions also can include stabilizers and preservatives. For examples of carriers, stabilizers and adjuvants, see Martin (1975) Remington's Pharm. Sci., 15th Ed. (Mack Publ. Co., Easton).

[0084] A “subject” of diagnosis or treatment is a cell or an animal such as a mammal, or a human. A subject is not limited to a specific species and includes non-human animals subject to diagnosis or treatment and those subject to infections or animal models, including, without limitation, simian, murine, rat, canine, or leporid species, as well as other livestock, sport animals, or pets. In embodiments, the subject is a human.

[0085] The term “tissue” is used herein to refer to tissue of a living or deceased organism or any tissue derived from or designed to mimic a living or deceased organism. The tissue may be healthy, diseased, and/or have genetic mutations. The biological tissue may include any single tissue (e.g., a collection of cells that may be interconnected), or a group of tissues making up an organ or part or region of the body of an organism. The tissue may comprise, consist essentially of, or consist of a homogeneous cellular material or it may be a composite structure such as that found in regions of the body including the thorax which for instance can include lung tissue, skeletal tissue, and/or muscle tissue. Exemplary tissues include, but are not limited to those derived from liver, lung, thyroid, skin, pancreas, blood vessels, bladder, kidneys, brain, biliary tree, duodenum, abdominal aorta, iliac vein, heart and intestines, including any combination thereof.

[0086] As used herein, “treating” or “treatment” of a disease in a subject refers to (1) preventing the symptoms or disease from occurring in a subject that is predisposed or does not yet display symptoms of the disease; (2) inhibiting the disease or arresting its development; or (3) ameliorating or causing regression of the disease or the symptoms of the disease. As understood in the art, “treatment” is an approach for obtaining beneficial or desired results, including clinical results. For the purposes of the present technology, beneficial or desired results can include one or more, but are not limited to, alleviation or amelioration of one or more symptoms, diminishment of extent of a condition (including a disease), stabilized (i.e., not worsening) state of a condition (including disease), delay or slowing of condition (including disease), progression, amelioration or palliation of the condition (including disease), states and remission (whether partial or total), whether detectable or undetectable.

[0087] As used herein the term “effective amount” intends to mean a quantity sufficient to achieve a desired effect. In the context of therapeutic or prophylactic applications, the effective amount will depend on the type and severity of the condition at issue and the characteristics of the individual subject, such as general health, age, sex, body weight, and tolerance to pharmaceutical compositions. In the context of gene therapy, in embodiments the effective amount is the amount sufficient to result in regaining part or full function of a gene that is deficient in a subject. In embodiments, the effective amount of an AAV viral particle is the amount sufficient to result in expression of a gene in a subject. The skilled artisan will be able to determine appropriate amounts depending on these and other factors.

[0088] In embodiments, the effective amount will depend on the size and nature of the application in question. It will also depend on the nature and sensitivity of the target subject and the methods in use. The skilled artisan will be able to determine the effective amount based on these and other considerations. The effective amount may comprise, consist essentially of, or consist of one or more administrations of a composition depending on the embodiment.

[0089] As used herein, the term “administer” or “administration” intends to mean delivery of a substance to a subject such as an animal or human. Administration can be effected in one dose, continuously or intermittently throughout the course of treatment. Methods of determining the most effective means and dosage of administration will vary with the composition used for therapy, the purpose of the therapy, as well as the age, health or gender of the subject being treated. Single or multiple administrations can be carried out with the dose level and pattern being selected by the treating physician or in the case of pets and other animals, treating veterinarian.

### AAV Structure and Function

[0090] AAV is a replication-deficient parvovirus, the single-stranded DNA genome of which is about 4.7 kb in length, including two about 145-nucleotide inverted terminal repeat (ITRs). There are multiple serotypes of AAV. The nucleotide sequences of the genomes of the AAV serotypes are known. For example, the complete genome of AAV-1 is provided in GenBank Accession No. NC_002077; the complete genome of AAV-2 is provided in GenBank Accession No. NC_001401 and Srivastava et al., J. Virol., 45: 555-564 (1983); the complete genome of AAV-3 is provided in GenBank Accession No. NC_1829; the complete genome of AAV-4 is provided in GenBank Accession No. NC_001829; the AAV-5 genome is provided in GenBank Accession No. AF085716; the complete genome of AAV-6 is provided in GenBank Accession No. NC_001862; at least portions of AAV-7 and AAV-8 genomes are provided in GenBank Accession Nos. AX753246 and AX753249, respectively, the AAV-9 genome is provided in Gao et al., J. Virol., 78: 6381-6388 (2004); the AAV-10 genome is provided in Mol. Ther., 13(1): 67-76 (2006); and the AAV-11 genome is provided in Virology, 330(2): 375-383 (2004). The sequence of the AAV rh.74 genome is provided in U.S. Pat. No. 9,434,928, incorporated herein by reference in its entirety. U.S. Pat. No. 9,434,928 also provide the sequences of the capsid proteins and a self-complementary genome. In one aspect, the genome is a self-complementary genome. Cis-acting sequences directing viral DNA replication (rep), encapsidation/packaging and host cell chromosome integration are contained within the AAV ITRs. Three AAV promoters (named p5, p19, and p40 for their relative map locations) drive the expression of the two AAV internal open reading frames encoding rep and cap genes. The two rep promoters (p5 and p19), coupled with the differential splicing of the single AAV intron (at nucleotides 2107 and 2227), result in the production of four rep proteins (rep 78, rep 68, rep 52, and rep 40) from the rep gene. Rep proteins possess multiple enzymatic properties that are ultimately responsible for replicating the viral genome.

[0091] The cap gene is expressed from the p40 promoter and encodes the three capsid proteins, VP1, VP2, and VP3. Alternative splicing and non-consensus translational start sites are responsible for the production of the three related capsid proteins. More specifically, after the single mRNA from which each of the VP1, VP2 and VP3 proteins are translated is transcribed, it can be spliced in two different manners: either a longer or shorter intron can be excised, resulting in the formation of two pools of mRNAs: a 2.3 kb- and a 2.6 kb-long mRNA pool. The longer intron is often preferred and thus the 2.3-kb-long mRNA can be called the major splice variant. This form lacks the first AUG codon, from which the synthesis of VP1 protein starts, resulting in a reduced overall level of VP1 protein synthesis. The first AUG codon that remains in the major splice variant is the initiation codon for the VP3 protein. However, upstream of that codon in the same open reading frame lies an ACG sequence (encoding threoninc) which is surrounded by an optimal Kozak (translation initiation) context. This contributes to a low level of synthesis of the VP2 protein, which is actually the VP3 protein with additional N terminal residues, as is VP1, as described in Becerra S P et al., (December 1985). “Direct mapping of adeno-associated virus capsid proteins B and C: a possible ACG initiation codon”. Proceedings of the National Academy of Sciences of the United States of America. 82 (23): 7919-23, Cassinotti P et al., (November 1988). “Organization of the adeno-associated virus (AAV) capsid gene: mapping of a minor spliced mRNA coding for virus capsid protein 1”. Virology. 167 (1): 176-84, Muralidhar S et al., (January 1994). “Site-directed mutagenesis of adeno-associated virus type 2 structural protein initiation codons: effects on regulation of synthesis and biological activity”. Journal of Virology. 68 (1): 170-6, and Trempe J P, Carter B J (September 1988). “Alternate mRNA splicing is required for synthesis of adeno-associated virus VP1 capsid protein”. Journal of Virology. 62 (9): 3356-63, each of which is herein incorporated by reference. A single consensus polyadenylation signal is located at map position 95 of the AAV genome. The life cycle and genetics of AAV are reviewed in Muzyczka, Current Topics in Microbiology and Immunology, 158: 97-129 (1992).

[0092] Each VP1 protein contains a VP1 portion, a VP2 portion and a VP3 portion. The VP1 portion is the N-terminal portion of the VP1 protein that is unique to the VP1 protein, corresponding to the amino acids 1-137 portion of SEQ ID NO: 164. The VP2 portion is the amino acid sequence present within the VP1 protein that is also found in the N-terminal portion of the VP2 protein, corresponding to the amino acids 138-202 portion of SEQ ID NO: 164. The VP3 portion and the VP3 protein have the same sequence. The VP3 portion is the C-terminal portion of the VP1 protein that is shared with the VP1 and VP2 proteins, corresponding to the amino acids 203-737 portion of SEQ ID NO: 164. See FIG. 5.

[0093] The VP3 protein can be further divided into discrete variable surface regions I-IX (VR-I-IX). Each of the variable surface regions (VRs) can comprise or contain specific amino acid sequences that either alone or in combination with the specific amino acid sequences of each of the other VRs can confer unique infection phenotypes (e.g., decreased antigenicity, improved transduction and/or tissue-specific tropism relative to other AAV serotypes) to a particular serotype as described in DiMatta et al., “Structural Insight into the Unique Properties of Adeno-Associated Virus Serotype 9” J. Virol., Vol. 86 (12): 6947-6958, June 2012, the contents of which are incorporated herein by reference.

[0094] AAV possesses unique features that make it attractive as a viral vector for delivering foreign DNA to cells, for example, in gene therapy. AAV infection of cells in culture is noncytopathic, and natural infection of humans and other animals is silent and asymptomatic. Moreover, AAV infects many mammalian cells allowing the possibility of targeting many different tissues in vivo. Moreover, AAV transduces slowly dividing and non-dividing cells, and can persist essentially for the lifetime of those cells as a transcriptionally active nuclear episome (extrachromosomal element). The AAV proviral genome is inserted as cloned DNA in plasmids, which makes construction of recombinant genomes feasible. Furthermore, because the signals directing AAV replication and genome encapsidation are contained within the ITRs of the AAV genome, some or all of the internal approximately 4.3 kb of the genome (encoding replication and structural capsid proteins, rep-cap) may be replaced with foreign DNA to generate AAV vector genomes. The rep and cap proteins may be provided in trans. Another significant feature of AAV is that it is an extremely stable and hearty virus. It easily withstands the conditions used to inactivate adenovirus (56° to 65° C. for several hours), making cold preservation of AAV less critical. AAV may even be lyophilized. Finally, AAV-infected cells are not resistant to superinfection.

[0095] Multiple studies have demonstrated long-term (>1.5 years) recombinant AAV-mediated protein expression in muscle. See, Clark et al., Hum Gene Ther, 8: 659-669 (1997); Kessler et al., Proc Nat. Acad Sc. USA, 93: 14082-14087 (1996); and Xiao et al., J Virol, 70: 8098-8108 (1996). See also, Chao et al., Mol Ther, 2:619-623 (2000) and Chao et al., Mol Ther, 4:217-222 (2001). Moreover, because muscle is highly vascularized, recombinant AAV transduction has resulted in the appearance of transgene products in the systemic circulation following intramuscular injection as described in Herzog et al., Proc Natl Acad Sci USA, 94: 5804-5809 (1997) and Murphy et al., Proc Natl Acad Sci USA, 94: 13921-13926 (1997). Moreover, Lewis et al., J Virol, 76: 8769-8775 (2002) demonstrated that skeletal myofibers possess the necessary cellular factors for correct antibody glycosylation, folding, and secretion, indicating that muscle is capable of stable expression of secreted protein therapeutics. Recombinant AAV (rAAV) genomes of the invention comprise, consist essentially of, or consist of a nucleic acid molecule encoding a therapeutic protein (e.g., CYP4V2, RS1, PDE6B, ABCA4, BEST1, OPA1 or OPA3) and one or more AAV ITRs flanking the nucleic acid molecule. AAV DNA in the rAAV genomes may be from any AAV serotype for which a recombinant virus can be derived including, but not limited to, AAV serotypes AAV-1, AAV-2, AAV-3, AAV-4, AAV-5, AAV-6, AAV-7, AAV-8, AAV-9, AAV-10, AAV-11, AAV-12, AAV-13, AAV PHP.B and AAV rh74. Production of pseudotyped rAA Vis disclosed in, for example, WO2001083692. Other types of rAAV variants, for example rAAV with capsid mutations, are also contemplated. See, e.g., Marsic et al., Molecular Therapy, 22(11): 1900-1909 (2014). The nucleotide sequences of the genomes of various AAV serotypes are known in the art.

### AAV Vector Particles, Capsid Proteins, and AAV Vectors

[0096] Provided herein are AAV vector particles, AAV vectors, and capsid proteins that have desirable tissue specificity and find use in delivering a variety of therapeutic payloads, including nucleic acids, and proteins useful in the treatment of disease.

### AAV Capsid Proteins

[0097] The disclosure provides AAV particles possessing properties of high gene transfer efficiency and increased tissue tropism. AAV viral vector delivery currently relies on the use of serotype selection for tissue targeting based on the natural tropism of the virus or by the direct injection into target tissues. Many currently available AAV viral vectors are, however, suboptimal for delivering genes to a specific target site.

[0098] The present disclosure provides AAV capsid protein sequences that confer high gene transfer efficiency and increased tissue specificity on the AAV particles comprising them. In embodiments, the AAV particles comprising such AAV capsid proteins are administered via a specific delivery route to achieve optimal delivery to specific target site.

[0099] In embodiments, the VP1 capsid protein comprises any one of the amino acid sequences listed in Table 1, or a sequence having up to 1, 2, 3, 4, 5, 6, 7, 8, 9, or 10 amino acids mutated, deleted or added as compared to, any one of the amino acid sequences listed in Table 1. In embodiments, up to 15 amino acids, up to 20 amino acids, up to 30 amino acids, or up to 40 amino acids may be mutated, deleted or added compared to these sequences, In embodiments, the VP1 capsid protein is encoded by any one of the nucleic acid sequences listed in Table 1, or a sequence having up to 5, up to 10, up to 30, or up to 60 nucleotide changes to any one of the nucleic acid sequences listed in Table 1.

TABLE 1
VP1 Capsid Proteins

| Amino Acid SEQ ID NO: | NA SEQ ID NO: | AAV Capsid Name |
|---|---|---|
| 1 | 98 | AAV 110 |
| 2 | 15 | AAV 204 |
| 3 | 18 | AAV 214 |
| 30 | 19 | AAV 214A |
| 31 | 20 | AAV 214e |
| 32 | 21 | AAV 214e8 |
| 33 | 22 | AAV 214e9 |
| 34 | 23 | AAV 214e10 |
| 49 | 47 | AAV ITB102_45 |
| 84 | 82 | AAV 214AB |
| 164 | 167 | AAV 214-D5 |

[0100] In embodiments, the AAV VP1 protein comprises, consists essentially of, or consists of an amino acid sequence of SEQ ID NOs: 1-3, 30-34, 49, 84 or 164, or a sequence having up to 1, 2, 3, 4, 5, 6, 7, 8, 9, or 10 amino acids different from SEQ ID NOs: 1-3, 30-34, 49, 84 or 164. Also provided are polynucleotides encoding these VP1 proteins. In embodiments, the polynucleotides encoding the VP1 proteins comprise, consist essentially of, or consist of the sequence of SEQ ID NOs: 15, 18-23, 47, 82, 98 or 167 or a sequence having up to 5, up to 10, or up to 30 nucleotide changes to SEQ ID NOs: 15, 18-23, 47, 82, 98 or 167.

[0101] In embodiments, the AAV capsid sequence is an AAV-110 capsid protein (SEQ ID NO: 1), AAV204 capsid protein (SEQ ID NO: 2), AAV214 capsid protein (SEQ ID NO: 3) or AAV ITB102_45 capsid protein (SEQ ID NO: 49). In embodiments, the AAV capsid protein is a variant of the AAV214 capsid protein. In embodiments, the AAV capsid protein is AAV214A (SEQ ID NO: 30), AAV-214-AB (SEQ ID NO: 84), AAV214e (SEQ ID NO: 31), AAV214e8 (SEQ ID NO: 32), AAV214e9 (SEQ ID NO: 33), AAV214e10 (SEQ ID NO: 34), or AAV214-D5 (SEQ ID NO: 164). In embodiments, the AAV capsid protein is AAV214-D5 (SEQ ID NO: 164).

[0102] In embodiments, the AAV capsid sequence is an AAV204 capsid protein (SEQ ID NO: 2), AAV214 capsid protein (SEQ ID NO: 3), AAV214-D5 capsid protein (SEQ ID NO: 164) or AAV8 capsid protein (SEQ ID NO: 67).

[0103] Sequences for exemplary VP2 and VP3 proteins are provided in Table 2 and Table 3. Given the VP2 and VP3 sequences, the VP1 portions may be determined by alignment with the full, VP1 protein sequence.

TABLE 2
VP2 Capsid Proteins

| Amino Acid SEQ ID NO: | Name |
|---|---|
| 35 | 214 |
| 36 | 214A |
| 37 | 214e |
| 38 | 214e8 |
| 39 | 214e9 |
| 40 | 214e10 |
| 85 | 214AB |
| 50 | ITB102_45 |
| 165 | 214-D5 |

[0104] In embodiments, the AAV VP2 proteins comprise, consist essentially of, or consist of an amino acid sequence of any one of SEQ ID NOs: 35-40, 50, 85 and 165, or a sequence having up to 1, 2, 3, 4, 5, 6, 7, 8, 9, or 10 amino acids different from SEQ ID NOs: 35-40, 50, 85 or 165. In embodiments, the AAV VP2 proteins comprise, consist essentially of, or consist of an amino acid sequence of SEQ ID NO: 165, or a sequence having up to 1, 2, 3, 4, 5, 6, 7, 8, 9, or 10 amino acids different from SEQ ID NO: 165.

[0105] Also provided are polynucleotides encoding these VP2 proteins. In embodiments, the polynucleotide encoding the VP2 protein comprises, consists essentially of, or consists of the sequence of SEQ ID NO: 47, or a sequence having up to 5, up to 10, or up to 30 nucleotide changes to SEQ ID NO: 47. In embodiments, the polynucleotide encoding the VP2 protein comprises, consists essentially of, or consists of the sequence of SEQ ID NO: 168, or a sequence having up to 5, up to 10, or up to 30 nucleotide changes to SEQ ID NO: 168.

[0106] Exemplary nucleic acids for the other capsid VP2 portions may be derived from the corresponding portions of the VP1 capsid protein nucleic acids.

TABLE 3
VP3 Capsid proteins

| Amino Acid SEQ ID NO: | NA SEQ ID NO: | AAV Capsid Name |
|---|---|---|
| 17 | 16 | 204 |
| 41 | 24 | 214 |
| 42 | 25 | 214A |
| 43 | 26 | 214e |
| 44 | 27 | 214e8 |
| 45 | 28 | 214e9 |
| 46 | 29 | 214e10 |
| 86 | 83 | 214AB |
| 51 | 48 | ITB102_45 |
| 166 | 169 | 214-D5 |

[0107] The VP3 proteins of AAV214, AAV214e, AAV214e8, AAV214e9, AAV214e10 have the same amino acid (SEQ ID NO:41) and nucleic acid (SEQ ID NO: 24) sequences.

[0108] In embodiments, the AAV VP3 proteins comprise, consist essentially of, or consist of the amino acid sequence of SEQ ID NOs: 17, 41-46, 51, 86, or 166, or a sequence having up to 1, 2, 3, 4, 5, 6, 7, 8, 9, or 10 amino acids different from SEQ ID NOs: 17, 41-46, 51, 86, or 166. In embodiments, the AAV VP3 proteins comprise, consist essentially of, or consist of the amino acid sequence of SEQ ID NO: 166, or a sequence having up to 1, 2, 3, 4, 5, 6, 7, 8, 9, or 10 amino acids different from SEQ ID NO: 166.

[0109] Also provided are polynucleotides encoding these VP3 proteins. In embodiments, the polynucleotides encoding the proteins that comprise, consist essentially of, or consist of the sequence of SEQ ID NOs: 16, 24-29, 48, 83 or 169, or a sequence having up to 5, up to 10, or up to 30 nucleotide changes to SEQ ID NOs: 16, 24-29, 48, 83, or 169. In embodiments, the polynucleotides encoding the proteins that comprise, consist essentially of, or consist of the sequence of SEQ ID NO: 169, or a sequence having up to 5, up to 10, or up to 30 nucleotide changes to SEQ ID NO: 169.

[0110] In embodiments, the AAV capsid protein is a chimeric protein. In embodiments, a VP1, VP2, or VP3 portion of the AAV capsid protein disclosed herein may be replaced with a VP1, VP2, or VP3 portion from a different AAV capsid protein disclosed herein.

[0111] In embodiments, provided herein is an AAV capsid protein comprising a leucine residue at amino acid 129, an asparagine residue at amino acid 586 and a glutamic acid residue at amino acid 723, wherein amino acid positions in the AAV capsid protein are numbered with respect to amino acid positions in the amino acid sequence of SEQ ID NO: 2. In some cases, the protein comprises the amino acid sequence of SEQ ID NO: 2. In other cases, these amino acids may be introduced into other capsid proteins.

[0112] In embodiments, provided herein is an AAV VP1 capsid protein comprising a VP1 portion, a VP2 portion and a VP3 portion, wherein the VP1 portion comprises a leucine (L) residue at amino acid 129, wherein the VP2 portion comprises a threonine (T) or asparagine (N) residue at amino acid 157 and a lysine (K) or serine (S) residue at amino acid 162, and wherein the VP3 portion comprises asparagine (N) residue at amino acid 223, an alanine (A) residue at amino acid 224, a histidine (H) residue at amino acid 272, a threonine (T) residue at amino acid 410, a histidine (H) residue at amino acid 724 and a proline (P) residue at amino acid 734, wherein amino acid positions in the AAV capsid protein are numbered with respect to amino acid positions in the amino acid sequence of SEQ ID NO: 3 (i.e., VP1 capsid subunit numbering).

[0113] In embodiments, the VP1 portion further comprises an aspartic acid (D) or alanine (A) residue at amino acid 24, wherein amino acid positions in the AAV capsid protein are numbered with respect to amino acid positions in the amino acid sequence of SEQ ID NO: 3. In embodiments, the VP2 portion further comprises one or more of (i) a proline (P) residue at amino acid 148; (ii) an arginine (R) residue inserted at amino acid 152; (iii) an arginine (R) residue at amino acid 168; (iv) an isoleucine (I) residue at amino acid 189; and (v) a serine (S) residue at amino acid 200, wherein amino acid positions in the AAV capsid protein are numbered with respect to amino acid positions in the amino acid sequence of SEQ ID NO: 3.

[0114] In embodiments, one or more variable regions I through IX (see FIG. 5) in the disclosed VP3 portion capsid proteins may be removed and replaced with alternative regions. Suitable alternatives are identified in Table 6 below. The location for these, as well as the identity of additional alternatives may be identified by alignment to SEQ ID NO:41 as shown in FIG. 5. In embodiments, one or more VRs may have an insertion of 1, 2 or 3 amino acids. In embodiments, one or more VRs may have a deletion of 1, 2 or 3 amino acids.

TABLE 6
Variable Regions

| VR | Sequence |
|---|---|
| I | SASTGAS (SEQ ID NO. 52); NSTSGGSS (SEQ ID NO. 53); |
| | SSTSGGSS (SEQ ID NO: 87); NGTSGGST (SEQ ID NO: 170) |
| II | DNNGVK (SEQ ID NO. 54) |
| III | NDGS (SEQ ID NO. 55) |
| IV | INGSGQNQQT (SEQ ID NO. 56); QSTGGTAGTQQ (SEQ ID NO: |
| | 171) |
| V | RVSTTTGQNNNSNFAWTA (SEQ ID NO. 57) |
| VI | HKEGEDRFFPLSG (SEQ ID NO. 58) |
| VII | KQNAARDNADYSDV (SEQ ID NO: 59) |
| VIII | ADNLQQQNTAPQI (SEQ ID NO. 60) |
| IX | NYYKSTSVDF (SEQ ID NO. 61). |

[0115] The disclosure provides nucleic acids encoding any one of the AAV capsid proteins disclosed herein. The disclosure also provides vectors comprising any one of the nucleic acids disclosed herein.

[0116] In embodiments, AAV is an AAV9 serotype. Alternative serotypes or modified capsid viruses can be used to optimize neuronal tropism. Alternative vectors include: a modified AAV9 serotype vector for higher neuronal tropism than standard AAV9, e.g., PHP.B that uses a Cre-lox recombination system to identify neuronally targeted vectors. Alternatively, the AAV9 PHP.B has a modified amino acid 498 of VP1 from asparagine to lysine to reduce the liver tropism. Further variants of AAVrh74 that have mutated several amino acids can be used for very broad tissue tropism including the brain.

### AAV Vectors

[0117] The AAV vectors supply the nucleic acid that becomes encapsidated into the AAV vector particle including element(s) involved in controlling expression of the nucleic acids in the subject, as well as the ITRs to facilitate encapsidation. In embodiments, the AAV vectors disclosed herein comprise at least one heterologous nucleic acid (HNA) sequence, which, when expressed in a cell of a subject, is effective to treat a disease or disorder. In embodiments, the HNA sequence comprises a transgene. In embodiments, the AAV vectors comprise at least one ITR sequence and at least one transgene. In embodiments, the transgene encodes a therapeutic protein or a therapeutic RNA.

[0118] In embodiments, control of transgene expression in the host cell may be regulated by regulatory elements contained within the AAV vector, including promoter sequences, and polyadenylation signals. In embodiments, the AAV vector may also encode a signal peptide. In embodiments, the AAV vectors have 5′ and 3′ inverted terminal repeats (ITRs). The 5′ ITR is located upstream of a promoter, which in turn is upstream of the transgene. In embodiments, the 5′ and 3′ ITR have the same sequence. In embodiments, they have a different sequence. In embodiments, an AAV vector of the disclosure may comprise, in 5′ to 3′ orientation, a first (5′) ITR, a promoter, a transgene, a polyadenylation signal, and a second (3′) ITR.

[0119] In embodiments, the HNA (for example, an HNA comprising a transgene) is operably linked to a constitutive promoter. The constitutive promoter can be any constitutive promoter known in the art and/or provided herein. In embodiments, the constitutive promoter comprises, consists essentially of, or consists of a Rous sarcoma virus (RSV) LTR promoter (optionally with the RSV enhancer), a cytomegalovirus (CMV) promoter, an SV40 promoter, a dihydrofolate reductase promoter, a beta-actin promoter, a phosphoglycerol kinase (PGK) promoter, a U6 promoter, an H1 promoter, a hybrid chicken beta actin promoter, a MeCP2 promotor, an H1 promoter, a U1a promoter, a mMeP418 promoter, a mMeP426 promoter, a minimal MeCP2 promoter, a CAG promoter, or an EF1 promoter. It is known in the art that the nucleotide sequences of such promoters may be modified in order to increase or decrease the efficiency of mRNA transcription. See, e.g., Gao et al. (2018) Mol. Ther.: Nucleic Acids 12:135-145 (modifying TATA box of 7SK, U6 and H1 promoters to abolish RNA polymerase III transcription and stimulate RNA polymerase II-dependent mRNA transcription). In embodiments, the HNA sequence is operably linked to a tissue-specific control promoter, or an inducible promoter. In embodiments, the tissue-specific control promoter is a central nervous system (CNS) cell-specific promoter, a lung-specific promoter, a skin-specific promoter, a muscle-specific promoter, a liver-specific promoter, an eye-specific promoter (e.g., a VMD2, or mRho promoter).

[0120] In embodiments, the promoter may comprise, consist essentially of or consist of a polynucleotide having the sequence of SEQ ID NO: 96 (mouse U1 promoter) or a SEQ ID NO: 97 (a H1 promoter). In embodiments, the promoter is an U1a or U1b promoter, EF1 promoter, or CBA (chicken beta-actin). In embodiments, the promoter may comprise, consist essentially of or consist of any one of the nucleic acid sequences listed in Table 5, or a sequence having up to 5, up to 10, up to 20, or up to 30 nucleotide changes to any one of the nucleic acid sequences listed in Table 5. In embodiments, the promoter may comprise, consist essentially of, or consist of a nucleic acid sequence having at least 90%, at least 95%, at least 97%, at least 98%, at least 99%, or 100% identity to any one of the nucleic acid sequences listed in Table 5.

TABLE 5
Non-limiting Examples of Promoters

| | Nucleic acid |
|---|---|
| Promoter name | SEQ ID No. |
| Mouse U1a promoter | 152 |
| Polymerase III H1 mutant promoter | 153 |
| Chicken β-actin hybrid promoter CBh | 154 |
| (CBh promoter consists | |
| of CMV enhancer, CBA promoter, | |
| first CBA exon and partial intron) | |
| MeCP2 min promoter sequence | 155 |
| MeCP2 promoter sequence | 156 |
| MeCP418 promoter sequence | 157 |
| MeCP426 promoter sequence | 158 |
| VMD2 promoter | 159 |
| PDE6b promoter | 160 |
| mRho promoter | 161 |
| CMV promoter | 162 |
| UbC promoter | 163 |

[0121] In embodiments, the HNA sequence is operably liked to an additional regulatory element. The additional regulatory element can be a woodchuck hepatitis virus post-transcriptional regulatory element (“WPRE”). In embodiments, the AAV vector may comprise regulatory components suitable for growth and culture of the vector in a bacterial host for vector production purposes. For example, the vector may comprise genes for antibiotic resistance, and maintenance of the plasmid in bacteria, as well as associated regulatory elements to control protein expression in bacteria.

[0122] In embodiments, the HNA sequence is operably linked to a polyadenylation signal. In embodiments, the polyadenylation signal comprises, consists essentially of or consists of an MeCP2 polyadenylation signal, a retinol dehydrogenase 1 (RDH1) polyadenylation signal, a bovine growth hormone (BGH) polyadenylation signal, an SV40 polyadenylation signal, a SPA49 polyadenylation signal, a sNRP-TK65 polyadenylation signal, a sNRP polyadenylation signal, or a TK65 polyadenylation signal. An exemplary SPA49 polyadenylation signal is described in Ostedgaard et al., Proc. Nat'l Acad. Sci. USA (Feb. 22, 2005) 102:2952-2957, incorporated herein by reference.

### Heterologous Nucleic Acids (HNA)

[0123] The AAV viral vectors disclosed herein infect and deliver one or more heterologous nucleic acids (HNA) to target tissues. In embodiments, the HNA sequences are transcribed and optionally, translated in the cells of the target tissue.

[0124] In some cases, the HNA encodes an antisense RNA, microRNA, siRNA, or guide RNA (gRNA). CRISPR technology has been used to target the genome of living cells for modification Cas9 protein is a large enzyme that must be delivered efficiently to target tissues and cells to mediate gene repair through the CRISPR system and current CRISPR/Cas9 gene correction protocols suffer from a number of drawbacks. Long-term expression of Cas9 can elicit host immune responses. An additional guide RNA may be delivered via a separate vector due to packaging constraints. In embodiments, the HNA encodes a Cas9 protein or an equivalent thereof.

[0125] In embodiments, the HNA comprises a transgene encoding a protein, which may be expressed in cells of a subject to treat a disease or a disorder, resulting from reduced or eliminated activity of the native protein. Thus, in embodiments, the transgene may encode a protein selected from cystic fibrosis transmembrane conductance regulator (CFTR), N-acetyl-alpha-glucosaminidase (NAGLU), N-sulfoglucosamine sulfohydrolase (SGSH), palmitoyl-protein thioesterase 1 (PPT1), survival of motor neuron 1, telomeric (SMN1), alkaline phosphatase, biomineralization associated (ALPL, also known as TNALP), glial cell derived neurotrophic factor (GDNF), glucosylceramidase beta (GBA1), iduronidase alpha-L-(IDUA), methyl-CpG binding protein 2 (MeCP2), ceroid lipofuscinosis, neuronal, 1 (CLN1), rhodopsin (Rho), cytochrome P450 family 4 subfamily V member 2 (CYP4V2), retinoschisin 1 (RS1), phosphodiesterase 6B (PDE6B), ATP binding cassette subfamily A member 4 (ABCA4), Bestrophin-1 (BEST1), OPA1 Mitochondrial Dynamin Like GTPase (OPA1), and Optic Atrophy 3 (OPA3).

[0126] In embodiments, the transgene encodes a Cytochrome P450 family 4 subfamily V member 2 (CYP4V2). In embodiments, the CYP4V2 transgene comprises a mutant sequence, a codon-optimized sequence, and/or a truncated sequence of CYP4V2. In embodiments, the CYP4V2 transgene comprises, consists essentially of, or consists of a nucleic acid having the sequence of SEQ ID NO: 116, or a sequence having at least 80%, at least 85%, at least 90%, at least 95%, at least 97%, at least 98%, at least 99%, or at least 99.5% identity to SEQ ID NO: 116. In embodiments, the CYP4V2 transgene encodes a protein that comprises, consists essentially of, or consists of the amino acid sequence of SEQ ID NO: 142, or a sequence having at least 80%, at least 85%, at least 90%, at least 95%, at least 97%, at least 98%, at least 99%, or at least 99.5% identity to SEQ ID NO: 142. In embodiments, the AAV vector or AAV vector genome of the disclosure encodes CYP4V2 and is for treating Bietti's Crystalline Dystrophy.

[0127] In embodiments, the transgene encodes a Retinoschisin 1 (RS1). In embodiments, the RS1 transgene comprises a mutant sequence, a codon-optimized sequence, and/or a truncated sequence of RS1. In embodiments, the RS1 transgene comprises, consists essentially of, or consists of a nucleic acid having the sequence of SEQ ID NO: 117, or a sequence having at least 80%, at least 85%, at least 90%, at least 95%, at least 97%, at least 98%, at least 99%, or at least 99.5% identity to SEQ ID NO: 117. In embodiments, the RS1 transgene encodes a protein that comprises, consists essentially of, or consists of the amino acid sequence of SEQ ID NO: 143, or a sequence having at least 80%, at least 85%, at least 90%, at least 95%, at least 97%, at least 98%, at least 99%, or at least 99.5% identity to SEQ ID NO: 143. In embodiments, the AAV vector or AAV vector genome of the disclosure encodes RS1 and is for treating Retinoschisis.

[0128] In embodiments, the transgene encodes a Phosphodiesterase 6B (PDE6B). In embodiments, the PDE6B transgene comprises a mutant sequence, a codon-optimized sequence, and/or a truncated sequence of PDE6B. In embodiments, the PDE6B transgene comprises, consists essentially of, or consists of a nucleic acid having the sequence of SEQ ID NO: 118, or a sequence having at least 80%, at least 85%, at least 90%, at least 95%, at least 97%, at least 98%, at least 99%, or at least 99.5% identity to SEQ ID NO: 118. In embodiments, the PDE6B transgene encodes a protein that comprises, consists essentially of, or consists of the amino acid sequence of SEQ ID NO: 144, or a sequence having at least 80%, at least 85%, at least 90%, at least 95%, at least 97%, at least 98%, at least 99%, or at least 99.5% identity to SEQ ID NO: 144. In embodiments, the AAV vector or AAV vector genome of the disclosure encodes PDE6B and is for treating Retinitis pigmentosa.

[0129] In embodiments, the transgene encodes an ATP binding cassette subfamily A member 4 (ABCA4). In embodiments, the ABCA4 transgene comprises a mutant sequence, a codon-optimized sequence, and/or a truncated sequence of ABCA4. In embodiments, the ABCA4 transgene comprises, consists essentially of, or consists of a nucleic acid having the sequence of SEQ ID NO: 172, or a sequence having at least 80%, at least 85%, at least 90%, at least 95%, at least 97%, at least 98%, at least 99%, or at least 99.5% identity to SEQ ID NO: 172. In embodiments, the ABCA4 transgene encodes a protein that comprises, consists essentially of, or consists of the amino acid sequence of SEQ ID NO: 177, or a sequence having at least 80%, at least 85%, at least 90%, at least 95%, at least 97%, at least 98%, at least 99%, or at least 99.5% identity to SEQ ID NO: 177. In embodiments, the AAV vector or AAV vector genome of the disclosure encodes ABCA4 and is for treating Stargardt disease.

[0130] In embodiments, the transgene encodes a Bestrophin-1 (BEST-1). In embodiments, the BEST-1 transgene comprises a mutant sequence, a codon-optimized sequence, and/or a truncated sequence of BEST-1. In embodiments, the BEST-1 transgene comprises, consists essentially of, or consists of a nucleic acid having the sequence of SEQ ID NO: 173 or 174, or a sequence having at least 80%, at least 85%, at least 90%, at least 95%, at least 97%, at least 98%, at least 99%, or at least 99.5% identity to SEQ ID NO: 173 or 174. In embodiments, the BEST-1 transgene encodes a protein that comprises, consists essentially of, or consists of the amino acid sequence of SEQ ID NO: 178 or 179, or a sequence having at least 80%, at least 85%, at least 90%, at least 95%, at least 97%, at least 98%, at least 99%, or at least 99.5% identity to SEQ ID NO: 178 or 179. In embodiments, the AAV vector or AAV vector genome of the disclosure encodes BEST-1 and is for treating BEST vitelliform macular dystrophy.

[0131] In embodiments, the transgene encodes an OPA1 Mitochondrial Dynamin Like GTPase (OPA1). In embodiments, the OPA1 transgene comprises a mutant sequence, a codon-optimized sequence, and/or a truncated sequence of OPA1. In embodiments, the OPA1 transgene comprises, consists essentially of, or consists of a nucleic acid having the sequence of SEQ ID NO: 175, or a sequence having at least 80%, at least 85%, at least 90%, at least 95%, at least 97%, at least 98%, at least 99%, or at least 99.5% identity to SEQ ID NO: 175. In embodiments, the OPA1 transgene encodes a protein that comprises, consists essentially of, or consists of the amino acid sequence of SEQ ID NO: 180, or a sequence having at least 80%, at least 85%, at least 90%, at least 95%, at least 97%, at least 98%, at least 99%, or at least 99.5% identity to SEQ ID NO: 180. In embodiments, the AAV vector or AAV vector genome of the disclosure encodes OPA1 and is for treating Dominant Optic Atrophy.

[0132] In embodiments, the transgene encodes an Optic Atrophy 3 (OPA3). In embodiments, the OPA3 transgene comprises a mutant sequence, a codon-optimized sequence, and/or a truncated sequence of OPA3. In embodiments, the OPA3 transgene comprises, consists essentially of, or consists of a nucleic acid having the sequence of SEQ ID NO: 176, or a sequence having at least 80%, at least 85%, at least 90%, at least 95%, at least 97%, at least 98%, at least 99%, or at least 99.5% identity to SEQ ID NO: 176. In embodiments, the OPA3 transgene encodes a protein that comprises, consists essentially of, or consists of the amino acid sequence of SEQ ID NO: 181, or a sequence having at least 80%, at least 85%, at least 90%, at least 95%, at least 97%, at least 98%, at least 99%, or at least 99.5% identity to SEQ ID NO: 181. In embodiments, the AAV vector or AAV vector genome of the disclosure encodes OPA3 and is for treating Dominant Optic Atrophy.

[0133] In embodiments, the transgene comprises any one of the nucleic acid sequences listed in Table 4, or a sequence having up to 5, up to 10, or up to 30 nucleotide changes to any one of the DNA sequences in Table 4 (SEQ ID NOs: 116-118 and 172-176). In embodiments, the transgene encodes any one of the amino acid sequences listed in Table 4, or a sequence having up to 1, 2, 3, 4, 5, 6, 7, 8, 9, or 10 amino acids different from any one of the amino acid sequences listed in Table 4 (SEQ ID NOs: 142-144 and 177-181).

TABLE 4
Non-limiting Examples of Transgenes

| | | Amino acid SEQ | |
|---|---|---|---|
| | Nucleic acid | ID Nos. encoded | |
| Name of transgene | SEQ ID Nos. | by transgene | Features |
| Cytochrome P450 family | 116 | 142 | Natural |
| 4 subfamily V member 2 | | | |
| (CYP4V2) | | | |
| Retinoschisin 1 (RS1) | 117 | 143 | Natural |
| Phosphodiesterase 6B | 118 | 144 | Natural |
| (PDE6B) | | | |
| ATP binding cassette | 172 | 177 | Natural |
| subfamily A member 4 | | | |
| (ABCA4) | | | |
| Bestrophin-1 (BEST-1) | 173 | 178 | Natural |
| isoform 1 | | | |
| Bestrophin-1 (BEST-1) | 174 | 179 | Natural |
| isoform 2 | | | |
| OPA1 Mitochondrial | 175 | 180 | Natural |
| Dynamin Like GTPase | | | |
| (OPA1) | | | |
| Optic Atrophy 3 | 176 | 181 | Natural |
| (OPA3) | | | |

[0134] In embodiments, the transgene comprises a nucleic acid sequence set forth in any one of SEQ ID NOs: 99-133 and 172-176, or a sequence having up to 5, up to 10, or up to 30 nucleotide changes to any one of SEQ ID NOs: 99-133 and 172-176. In embodiments, the transgene encodes an amino acid sequence set forth in any one of SEQ ID NOs: 134-151 and 177-181, or a sequence having up to 1, 2, 3, 4, 5, 6, 7, 8, 9, or 10 amino acids different from any one of the amino acid sequences SEQ ID NOs: 134-151 and 177-181.

[0135] In embodiments, the heterologous nucleic acid encodes a reporter protein; for example, a fluorescent protein.

### Methods of Producing AAV Viral Vectors

[0136] A variety of approaches may be used to produce AAV viral vectors. In embodiments, packaging is achieved by using a helper virus or helper plasmid and a cell line. The helper virus or helper plasmid contains elements and sequences that facilitate viral vector production. In another aspect, the helper plasmid is stably incorporated into the genome of a packaging cell line, such that the packaging cell line does not require additional transfection with a helper plasmid.

[0137] In embodiments, the cell is a packaging or helper cell line. In embodiments, the helper cell line is eukaryotic cell; for example, an HEK 293 cell or 293T cell. In embodiments, the helper cell is a yeast cell or an insect cell.

[0138] In embodiments, the cell comprises a nucleic acid encoding a tetracycline activator protein; and a promoter that regulates expression of the tetracycline activator protein. In embodiments, the promoter that regulates expression of the tetracycline activator protein is a constitutive promoter. In embodiments, the promoter is a phosphoglycerate kinase promoter (PGK) or a CMV promoter.

[0139] A helper plasmid may comprise, for example, at least one viral helper DNA sequence derived from a replication-incompetent viral genome encoding in trans all virion proteins required to package a replication incompetent AAV, and for producing virion proteins capable of packaging the replication-incompetent AAV at high titer, without the production of replication-competent AAV.

[0140] Helper plasmids for packaging AAV are known in the art, see, e.g., U.S. Patent Pub. No. 2004/0235174 A1, incorporated herein by reference. As stated therein, an AAV helper plasmid may contain as helper virus DNA sequences, by way of non-limiting example, the Ad5 genes E2A, E4 and VA, controlled by their respective original promoters or by heterologous promoters. AAV helper plasmids may additionally contain an expression cassette for the expression of a marker protein such as a fluorescent protein to permit the simple detection of transfection of a desired target cell.

[0141] The disclosure provides methods of producing AAV particles comprising transfecting a packaging cell line with any one of the AAV helper plasmids disclosed herein; and any one of the AAV vectors disclosed herein. In embodiments, the AAV helper plasmid and the AAV vector are co-transfected into the packaging cell line. In embodiments, the cell line is a mammalian cell line, for example, human embryonic kidney (HEK) 293 cell line. The disclosure provides cells comprising any one of the AAV vectors and/or AAV particles disclosed herein.

### Pharmaceutical Compositions

[0142] The disclosure provides pharmaceutical compositions comprising any one of the AAV vectors, AAV capsids and/or AAV particles described herein. Typically, the AAV particles are administered for therapy.

[0143] The pharmaceutical composition, as described herein, may be formulated by any methods known or developed in the art of pharmacology, which include but are not limited to contacting the active ingredients (e.g., viral particles or AAV vectors) with an excipient or other accessory ingredient, dividing or packaging the product to a dose unit. The viral particles of this disclosure may be formulated with desirable features, e.g., increased stability, increased cell transfection, sustained or delayed release, biodistributions or tropisms, modulated or enhanced translation of encoded protein in vivo, and the release profile of encoded protein in vivo.

[0144] As such, the pharmaceutical composition may further comprise saline, lipidoids, liposomes, lipid nanoparticles, polymers, lipoplexes, core-shell nanoparticles, peptides, proteins, cells transfected with AAV vectors or transduced with AAV viral particles (e.g., for transplantation into a subject), nanoparticle mimics or combinations thereof. In embodiments, the pharmaceutical composition is formulated as a nanoparticle. In embodiments, the nanoparticle is a self-assembled nucleic acid nanoparticle.

[0145] A pharmaceutical composition in accordance with the present disclosure may be prepared, packaged, and/or sold in bulk, as a single unit dose, and/or as a plurality of single unit doses. The amount of the active ingredient is generally equal to the dosage of the active ingredient which would be administered to a subject and/or a convenient fraction of such a dosage such as, for example, one-half or one-third of such a dosage. The formulations of the invention can include one or more excipients, each in an amount that together increases the stability of the viral vector, increases cell transfection or transduction by the viral vector, increases the expression of viral vector encoded protein, and/or alters the release profile of viral vector encoded proteins. In embodiments, the pharmaceutical composition comprises an excipient. Non limiting examples of excipients include solvents, dispersion media, diluents, or other liquid vehicles, dispersion or suspension aids, surface active agents, isotonic agents, thickening or emulsifying agents, preservatives, or combination thereof.

[0146] In embodiments, the pharmaceutical composition comprises a cryoprotectant. The term “cryoprotectant” refers to an agent capable of reducing or eliminating damage to a substance during freezing. Non-limiting examples of cryoprotectants include sucrose, trehalose, lactose, glycerol, dextrose, raffinose and/or mannitol.

### Therapeutic Methods

[0147] This disclosure provides methods of preventing or treating a disorder, comprising, consisting essentially of, or consisting of administering to a subject a therapeutically effective amount of any one of the pharmaceutical compositions disclosed herein.

[0148] In embodiments, the disorder is a CNS disorder, a skin disorder, a lung disorder, a muscle disorder, a liver disorder, or an ophthalmic disease (or a retinal disease). In embodiments, the disorder is cystic fibrosis. In embodiments, the disorder is an ophthalmic disease. In embodiments, the disorder is a retinal disease.

[0149] In embodiments, the disorder is hypophosphatasia, amyotrophic lateral sclerosis (ALS), spinal muscular atrophy (SMA), recessive dystrophic epidermolysis bullosa (RDEB), lysosomal storage disorder (including Duchenne's Muscular Dystrophy, and Becker muscular dystrophy), juvenile Batten disease, infantile Batten disease, autosomal dominant disorders, muscular dystrophy, Bietti's Crystalline Dystrophy, retinoschisis (e.g., degenerative, hereditary, tractional, exudative), hemophilia A, hemophilia B, multiple sclerosis, diabetes mellitus, Fabry disease, Pompe disease, neuronal ceroid lipofuscinosis 1 (CLN1), CLN3 disease (or Juvenile Neuronal Ceroid Lipofuscinosis), Gaucher disease, cancer, arthritis, muscle wasting, heart disease, intimal hyperplasia, Rett syndrome, epilepsy, Huntington's disease, Parkinson's disease, Alzheimer's disease, an autoimmune disease, cystic fibrosis, thalassemia, Hurler's Syndrome (MPS IH), Sly syndrome, Scheie Syndrome, Hurler-Scheie Syndrome, Hunter's Syndrome, Sanfilippo Syndrome A (mucopolysaccharidosis IIIA or MPS IIIA), Sanfilippo Syndrome B (mucopolysaccharidosis IIIB or MPS IIIB), Sanfilippo Syndrome C, Sanfilippo Syndrome D, Morquio Syndrome, Maroteaux-Lamy Syndrome, Krabbe's disease, phenylketonuria, spinal cerebral ataxia, LDL receptor deficiency, hyperammonemia, anemia, arthritis, or adenosine deaminase deficiency.

[0150] In addition to specific transgenes disclosed herein, known active enzyme sequences may be used as transgenes to deliver functional enzyme activity.

[0151] In embodiments, the disorder is CLN3 disease. CLN3 disease or Juvenile Neuronal Ceroid Lipofuscinosis is a lysosomal storage disease caused by an autosomal recessively inherited mutation in the CLN3 gene. CLN3 disease is a progressive neurodegenerative disorder in which the central nervous system (CNS) is greatly affected resulting in behavioral issues, vision loss, and other cognitive disabilities.

[0152] In embodiments, the disorder is Fabry disease. Fabry disease is an X-linked lysosomal storage disorder caused by a deficiency in alpha-galactosidase A (GLA) activity that results in the accumulation of the glycolipid products, globotriaosylceramide (Gb3) and lyso-Gb3 in the lysosome. Disease presentation is highly heterogeneous but usually includes frequent bouts of peripheral neurotrophic pain, angiokeratomas, reduced sweat production, corneal dystrophy, and gastrointestinal complications. As the disease progresses patients suffer from cardiomyopathy, renal insufficiency and cerebrovascular disease, all of which are the primary causes of reduced life-span in Fabry patients. While males are the most severely affected population of patients with mutations in the GLA gene, it has become increasingly clear that female patients are also frequently symptomatic but are often misdiagnosed. Enzyme replacement therapy (ERT) is currently the only FDA-approved therapy to treat Fabry and requires bi-weekly injections of relatively large quantities of recombinant protein. While ERT reduces the accumulation of Gb3 in the heart, kidney and vasculature it fails to completely treat all symptoms of Fabry, primarily due to its inability to efficiently enter the CNS. Gene therapy strategies have been investigated and while many show great promise in correcting the glycolipid accumulation, most have failed to efficiently enter the CNS and also suffered from an immune response often seen during GLA replacement.

[0153] In embodiments, the AAV viral vectors disclosed herein are used to treat Fabry disease in patients, who are unresponsive to ERT, or when ERT fails to address all symptoms. In embodiments, the AAV viral vectors disclosed herein are used to treat Fabry disease in patients who have already been administered ERT.

[0154] In embodiments, the disorder is Pompe disease. Pompe disease is a lysosomal storage disorder caused by a deficiency in acid α-glucosidase (GAA) activity that results in the accumulation of glycogen in the lysosome. The disease presents as a form of muscular dystrophy which primarily affects both smooth and striated musculature as well as the central nervous system (CNS), with early mortality. Enzyme replacement therapy (ERT) is currently the only FDA-approved therapy to treat Pompe and requires bi-weekly injections of relatively large quantities of recombinant protein. While ERT significantly reduces the mortality rate of infantile Pompe patients, who typically die by the age of two without therapy, it fails to completely ameliorate all symptoms of Pompe, primarily due to its inability to efficiently enter the CNS and resulting immune responses to the GAA protein. Gene therapy strategies have been investigated and while many show great promise in correcting the glycogen accumulation and other symptoms of Pompe. Most have suffered from the severe immune response seen during GAA replacement. Previous work has demonstrated that hepatic-specific expression can make animals tolerate to the GAA protein and significantly reduce the humoral response.

[0155] In embodiments, the AAV viral vectors disclosed herein are used to treat Pompe disease in patients who have already been administered ERT; for example those who are unresponsive to ERT, or when ERT fails to address all their symptoms.

[0156] In embodiments, the AAV viral vectors disclosed herein are used to treat a cancer. In embodiments, the cancer is a solid cancer; for example, bladder, breast, cervical, colon, rectal, endometrial, kidney, lip, oral, liver, melanoma, mesothelioma, non-small cell lung, non-melanoma skin, ovarian, pancreatic, prostate, sarcoma, small cell lung tumor, or thyroid.

[0157] In embodiments, the disorder is an ophthalmic disease. The eye is immune privileged tissue. Only a very small number of viruses is necessary for therapeutic benefit. In embodiments, the ophthalmic disease affects photoreceptor and RPE cells. In embodiments, the ophthalmic disease comprises, consists essentially of, or consists of retinitis pigmentosa (e.g., autosomal recessive (SPATA7 gene; LRAT gene; TULP1 gene), autosomal dominant (AIPL1 gene), and X-linked (RPGR gene)), eye disorders related to mutations in the bestrophin-1 (BEST-1 or BEST1) gene (e.g., vitelliform macular dystrophy, age-related macular degeneration, autosomal dominant vitreoretinochoroidopathy, glaucoma, cataracts), Leber congenital amaurosis (LCA; aryl-hydrocarbon interacting protein-like 1 (AIPL1) gene), cone-rod dystrophy (CRD; ABCA4 gene), Stargardt's (ABCA4 gene), choroideremia (CHM gene), Usher Syndrome (MYO7A gene; CDH23 gene; USH2A gene; CLRN1 gene), Dominant Optic Atrophy (e.g., autosomal (OPA1 gene; OPA3 gene)), retinitis pigmentosa (PDE6B gene), retinoschisis (RS1 gene), Bietti's Crystalline Dystrophy (CYP4V2 gene) or Achromatopsia (CNGA3 gene, CNGB3 gene, GNAT2 gene, PDE6C gene, or PDE6H gene).

[0158] In embodiments, the disclosure provides methods of expressing a transgene in a retinal cell. In embodiments, the method comprises delivering a nucleic acid of the disclosure to the retinal cell. In embodiments, the method comprises transducing the retinal cell with the AAV viral vector of the disclosure.

[0159] In embodiments, the target cells of the disclosure comprise retinal cells. In embodiments, the retinal cells comprise a photoreceptor, a bipolar cell, a retinal ganglion cell, a horizontal cell, or an amacrine cell. In embodiments, the retinal cells comprise a retinal ganglion cell. In embodiments, the retinal cells comprise a bipolar cell. In embodiments, the retinal cells comprise a horizontal cell. In embodiments, the retinal cells comprise an amacrine cell. In embodiments, the retinal cells comprise a photoreceptor. In embodiments, the photoreceptor comprises a rod cell and/or a cone cell.

[0160] In embodiments, the target cells of the disclosure comprise, consist essentially of, or consist of photoreceptor cells.

[0161] In embodiments, the subject is a mammal; for example, a human. In particular aspects, the human is an infant human; for example, under 3 years old, 2 years old, or under 1 year old.

[0162] The methods of treatment and prevention disclosed herein may be combined with appropriate diagnostic techniques to identify and select patients for the therapy or prevention. For example, the method of treating or preventing a disorder disclosed herein may further comprise steps of performing a genetic test to identify a gene mutation or deletion related to the disorder in the subject. In embodiments, the method of treating or preventing a disorder comprises administering to a subject who has been previously identified as carrying a mutation related to the disorder, or as being at high risk for developing the disorder (for example, based on hereditary factors).

[0163] The disclosure provides methods of increasing the level of a protein in a host cell, comprising contacting the host cell with any one of the AAV particles disclosed herein, wherein the AAV particle comprises any one of the AAV vector genomes disclosed herein, comprising an HNA sequence encoding the protein. In embodiments, the protein is a therapeutic protein. In embodiments, the host cell is in vitro, in vivo, or ex vivo. In embodiments, the host cell is derived from a subject. In embodiments, the subject suffers from a disorder, which results in a reduced level and/or functionality of the protein, as compared to the level and/or functionality of the protein in a normal subject.

[0164] In embodiments, the level of the protein is increased to level of about 1×10⁻⁷ ng, about 3×10⁻⁷ ng, about 5×10⁻⁷ ng, about 7×10⁻⁷ ng, about 9×10⁻⁷ ng, about 1×10⁻⁶ ng, about 2×106 ng, about 3×10⁻⁶ ng, about 4×10⁻⁶ ng, about 6×10⁻⁶ ng, about 7×10⁻⁶ ng, about 8×10⁻⁶ ng, about 9×10⁻⁶ ng, about 10×10⁻⁶ ng, about 12×10⁻⁶ ng, about 14×10⁻⁶ ng, about 16×10⁻⁶ ng, about 18×10⁻⁶ ng, about 20×10⁻⁶ ng, about 25×10⁻⁶ ng, about 30×10⁻⁶ ng, about 35×10⁻⁶ ng, about 40×10⁻⁶ ng, about 45×10⁻⁶ ng, about 50×10⁻⁶ ng, about 55×10⁻⁶ ng, about 60×10⁻⁶ ng, about 65×10⁻⁶ ng, about 70×10⁻⁶ ng, about 75×10⁻⁶ ng, about 80×10⁻⁶ ng, about 85×10⁻⁶ ng, about 90×10⁻⁶ ng, about 95×10⁻⁶ ng, about 10×10⁻⁵ ng, about 20×10⁻⁵ ng, about 30×10⁻⁵ ng, about 40×10⁻⁵ ng, about 50×10⁻⁵ ng, about 60×10⁻⁵ ng, about 70×10⁻⁵ ng, about 80×10⁻⁵ ng, or about 90×10⁻⁵ ng in the host cell.

[0165] The disclosure provides methods of introducing a gene of interest to a cell in a subject comprising contacting the cell with an effective amount of any one of the AAV viral particles disclosed herein, wherein the AAV viral particle contains any one of the AAV vector genomes disclosed herein, comprising the gene of interest.

### Dosage and Administration

[0166] Methods of determining the most effective means and dosage of administration are known to those of skill in the art and will vary with the composition used for therapy, the purpose of the therapy and the subject being treated. Single or multiple administrations can be carried out with the dose level and pattern being selected by the treating physician. It is noted that dosage may be impacted by the route of administration. Suitable dosage formulations and methods of administering the agents are known in the art. Non-limiting examples of such suitable dosages may be as low as 10⁹ vector genomes to as much as 10¹⁷ vector genomes per administration.

[0167] In embodiments of the methods described herein, the number of viral particles (e.g., AAV) administered to the subject ranges from about 10⁹ to about 10¹⁷. In embodiments, about 10¹⁰ to about 10¹², about 10¹¹ to about 10¹³, about 10¹¹ to about 10¹², about 10¹¹ to about 10¹⁴, about 5×10¹¹ to about 5×10¹², or about 10¹² to about 10¹³ viral particles are administered to the subject. For administration to a human eye, a total dose of about 1×10¹⁰ vg/eye may be used, and a total dose of 5×10⁹ vg/eye may be used for a mouse eye. Non-invasive, in vivo imaging techniques can be used to monitor efficacy/safety in animals, which include but are not limited to scanning laser ophthalmoscopy (SLO), optical coherence tomography (OCT), multi-photon microscopy, fluorescein angiography.

[0168] In embodiments, the AAV particles repair the gene deficiency in a subject. In embodiments, the ratio of repaired target polynucleotide or polypeptide to unrepaired target polynucleotide or polypeptide in a successfully treated cell, tissue, organ or subject is at least about 1.5:1, about 2:1, about 3:1, about 4:1, about 5:1, about 6:1, about 7:1, about 8:1, about 9:1, about 10:1, about 20:1, about 50:1, about 100:1, about 1000:1, about 10,000:1, about 100,000:1, or about 1,000,000:1. The amount or ratio of repaired target polynucleotide or polypeptide can be determined by any method known in the art, including but not limited to Western analysis, Northern analysis, Southern analysis, PCR, sequencing, mass spectrometry, flow cytometry, immunohistochemistry, immunofluorescence, fluorescence in situ hybridization, next generation sequencing, immunoblot, and ELISA.

[0169] In embodiments, the viral particle is introduced to the subject intravenously, intrathecally, intracerebrally, intraventricularly, intranasally, intratracheally, intra-aurally, intra-ocularly, or peri-ocularly, orally, rectally, transmucosally, inhalationally, transdermally, parenterally, subcutaneously, intradermally, intramuscularly, intrapleurally, topically, intralymphatically, intracisternally; such introduction may also be intra-arterial, intracardiac, subventricular, epidural, intracerebral, intracerebroventricular, sub-retinal, para-retinal, intravitreal, intraarticular, intraperitoneal, intrauterine, or any combination thereof. In embodiments, the viral particles are delivered to a desired target tissue, e.g., to the lung, eye, or CNS, as non-limiting examples. In embodiments, delivery of viral particles is systemic. The intracisternal route of administration involves administration of a drug directly into the cerebrospinal fluid of the brain ventricles. It could be performed by direct injection into the cisterna magna or via a permanently positioned tube.

[0170] For treating an ophthalmic disease (or an eye disorder) intraocularly, there are multiple modes of administration known to those skilled in the art, including but not limited to: lacrimal gland (LG) administration, topical eye drop, intra-stromal administration to the cornea, intra-cameral administration (anterior chamber), intravitreal administration, sub-retinal administration, para-retinal administration, systemic administration, or a combination thereof. 80% of genetic eye disorders occur in the photoreceptors. Intravitreal delivery of small volume gene therapies can occur in an out-patient clinic.

[0171] In embodiments, the mode of administration is para-retinal administration. As used herein, the term “para-retinal administration” refers to a form of intravitreal administration that injects the therapeutic agent (e.g., an AAV viral vector) into the vitreous cavity in close proximity to the desired region of the retina (i.e., targeted delivery). In embodiments, the desired region of the retina is near the fovea area of the retina. In contrast to routine intravitreal administrations, which are done using short needles designed to deposit product in the mid-vitreous cavity, and do not require direct visualization, para-retinal injection is done under direct visualization of a longer needle capable of delivering product in the posterior vitreous cavity close to the retina. In embodiments, the therapeutic agent is deposited in the vitreous cavity at a distance of 0 mm to 13 mm from the surface of the retina, at a distance of 0 mm to 10 mm from the surface of the retina, at a distance of 0 mm to 5 mm from the surface of the retina, or at a distance of 0 mm to 3 mm from the surface of the retina. In embodiments, the therapeutic agent is deposited in the vitreous cavity at a distance of between 0-13 mm, between 0-12 mm, between 0-11 mm, between 0-10 mm, between 0-9 mm, between 0-8 mm, between 0-7 mm, between 0-6 mm, between 0-5 mm, between 0-4 mm, between 0-3 mm, between 0-2 mm, or between 0-1 mm, from the surface of the retina.

[0172] In embodiments, para-retinal administration is used in situations in which sub-retinal injection is not appropriate. In embodiments, para-retinal administration is used for targeted transduction of optic nerves. In embodiments, para-retinal administration is used for treating diseases or disorders that are related to dysfunction of the optic nerves. In embodiments, para-retinal administration is used for treating Dominant Optic Atrophy or Retinoschisis.

[0173] In embodiments, para-retinal administration involves the use of a small gauge needle (30 gauge or similar) with length sufficient to reach the posterior pole of the human eye (25 mm or similar), exo- or endo-illumination and visualization using a microscope, and use of a corneal contact lens to allow focus on the posterior vitreous cavity and retina. This is typically conducted after adequate analgesia and antisepsis, at which time the corneal contact lens is coupled to the eye and the microscope is positioned to view the posterior retina. The needle is inserted through the eye wall in the pars plana region and its tip is visualized. Under direct visualization, the needle tip is advanced to the desired location close to the retinal surface. The syringe plunger is advanced to slowly deposit the viral vector (which may be contained in any suitable composition or formulation). The needle is withdrawn and the eye is inspected. The port may be closed with a suture, but for a sufficiently small-caliber needle (such as 30 gauge), no suture is needed to close the needle tract. Ointment and an eye shield may be applied and, if desired, the subject can be kept in a supine position for a period post-operatively to further facilitate a high para-retinal concentration of the product. Variations on delivery instrumentation can include creation of a sclerotomy with or without the use of a vitrectomy port to allow use of a blunt cannula, and/or a cannula design with a tapered and/or flexible extendable tip or side ports to optimize proximity to the retinal surface and safety, and/or use of a pneumatic system in lieu of a simple syringe plunger. Additional descriptions of para-retinal administration are disclosed, for example, in WO 2020/018766 and Zeng et al., Mol Ther Methods Clin Dev. 2020 Sep. 11; 18: 422-427, the contents of each of which are incorporated herein by reference in their entireties for all purposes.

[0174] In embodiments, the mode of administration is sub-retinal administration, which injects the materials into the sub-retinal space between retinal pigment epithelium (RPE) cells and photoreceptors. In the sub-retinal space, the injected materials come into direct contact with the plasma membrane of the photoreceptor, and RPE cells and sub-retinal blebs. In embodiments, the AAV used for sub-retinal administration comprises the capsid protein of AAV214 or AAV214-D5. In embodiments, the sub-retinal administration is for treating Stargardt disease, Bietti's Crystalline Dystrophy, or BEST vitelliform macular dystrophy. Additional descriptions of sub-retinal administration are disclosed, for example, in Peng et. al., Ophthalmic Res 2017; 58:217-226; and Hartman et al., J Ocul Pharmacol Ther. 2018 Mar. 1; 34(1-2): 141-153, the contents of each of which are incorporated herein by reference in their entireties for all purposes.

[0175] Administration of the AAV viral particle or compositions of this disclosure can be effected in one dose, continuously or intermittently throughout the course of treatment. In embodiments, the AAV viral particle or compositions of this disclosure are parenterally administered by injection, infusion or implantation.

[0176] In embodiments, the AAV particles of this disclosure show enhanced tropism for brain and cervical spine. In embodiments, the viral particles of the disclosure can cross the blood-brain-barrier (BBB). In embodiments, the AAV particles of this disclosure show high retinal tropism by para-retinal, sub-retinal and/or intravitreal injections. In embodiments, the AAV particles of this disclosure target multiple eye cell types, such as, for example, cones, rods, and retinal pigment epithelium (RPE). In embodiments, AAV particles of this disclosure escape neutralizing antibodies against natural serotypes, and thus enable potential redosing. In a further aspect, the AAV particles and compositions of the disclosure may be administered in combination with other known treatments for the disorder being treated.

### Kits

[0177] The agents, viral vectors, or compositions described herein may, in embodiments, be assembled into pharmaceutical or diagnostic or research kits to facilitate their use in therapeutic, diagnostic or research applications. In embodiments, the kits of the present disclosure include any one of the modified AAV capsid proteins, AAV vectors, AAV viral particles, host cells, isolated tissues, compositions, or pharmaceutical compositions as described herein.

[0178] In embodiments, a kit further comprises instructions for use. Specifically, such kits may include one or more agents described herein, along with instructions describing the intended application and the proper use of these agents. As an example, in embodiments, the kit may include instructions for mixing one or more components of the kit and/or isolating and mixing a sample and applying to a subject. In embodiments, agents in a kit are in a pharmaceutical formulation and dosage suitable for a particular application and for a method of administration of the agents. Kits for research purposes may contain the components in appropriate concentrations or quantities for running various experiments.

[0179] The kit may be designed to facilitate use of the methods described herein and can take many forms. Each of the compositions of the kit, where applicable, may be provided in liquid form (e.g., in solution), or in solid form, (e.g., a dry powder). In certain cases, some of the compositions may be constitutable or otherwise processable (e.g., to an active form), for example, by the addition of a suitable solvent or other species (for example, water or a cell culture medium), which may or may not be provided with the kit. In embodiments, the compositions may be provided in a preservation solution (e.g., cryopreservation solution). Non-limiting examples of preservation solutions include DMSO, paraformaldehyde, and CryoStor® (Stem Cell Technologies, Vancouver, Canada). In embodiments, the preservation solution contains an amount of metalloprotease inhibitors.

[0180] In embodiments, the kit contains any one or more of the components described herein in one or more containers. Thus, in embodiments, the kit may include a container housing agents described herein. The agents may be in the form of a liquid, gel or solid (powder). The agents may be prepared sterilely, packaged in a syringe and shipped refrigerated. Alternatively, they may be housed in a vial or other container for storage. A second container may have other agents prepared sterilely. Alternatively, the kit may include the active agents premixed and shipped in a syringe, vial, tube, or other container. The kit may have one or more or all of the components required to administer the agents to a subject, such as a syringe, topical application devices, or IV needle tubing and bag.

[0181] It is to be understood that while the invention has been described in conjunction with the above embodiments, the foregoing description and examples are intended to illustrate and not limit the scope of the invention. Other aspects, advantages and modifications within the scope of the invention will be apparent to those skilled in the art to which the invention pertains.

[0182] In addition, where features or aspects of the invention are described in terms of Markush groups, those skilled in the art will recognize that the invention is also thereby described in terms of any individual member or subgroup of members of the Markush group.

### Further Numbered Embodiments

[0183] Embodiment 1. A method of treating an ophthalmic disease or disorder in a subject in need thereof, comprising para-retinal administration of an AAV viral vector to the subject, wherein the AAV viral vector comprises an AAV capsid protein comprising the amino acid sequence of SEQ ID NO: 2.

[0184] Embodiment 2. A method of treating an ophthalmic disease or disorder in a subject in need thereof, comprising para-retinal administration of an AAV viral vector to the subject, wherein the AAV viral vector comprises an AAV capsid protein comprising or consisting of an amino acid sequence that is at least 95%, at least 98%, at least 99%, at least 99.5%, or 100% identical to any one of SEQ ID NO: 1-3, 30-34, 49, 67, 84, and 164.

[0185] Embodiment 3. The method of Embodiment 2, wherein the AAV viral vector comprises an AAV capsid protein comprising an amino acid sequence that is up to 1, 2, 3, 4, 5, 6, 7, 8, 9, or 10 amino acids different from any one of SEQ ID NO: 1-3, 30-34, 49, 67, 84 and 164.

[0186] Embodiment 4. The method of Embodiment 2, wherein the AAV viral vector comprises an AAV capsid protein comprising or consisting of the amino acid sequence of SED ID NO: 2 or an amino acid sequence that is up to 1, 2, 3, 4, 5, 6, 7, 8, 9, or 10 amino acids different from SEQ ID NO: 2.

[0187] Embodiment 5. The method of Embodiment 4, wherein the AAV capsid protein comprises a leucine (L) at amino acid 129 of SEQ ID NO: 2, an asparagine (N) at amino acid 586 of SEQ ID NO: 2, and a glutamic acid (E) at amino acid 723 of SEQ ID NO: 2.

[0188] Embodiment 6. The method of Embodiment 2, wherein the AAV viral vector comprises an AAV capsid protein comprising or consisting of the amino acid sequence of SED ID NO: 1 or an amino acid sequence that is up to 2, 2, 3, 4, 5, 6, 7, 8, 9, or 10 amino acids different from SEQ ID NO: 1.

[0189] Embodiment 7. The method of Embodiment 6, wherein the AAV capsid protein comprises a leucine (L) at amino acid 129, a proline (P) at amino acid 148, a arginine (R) at amino acid 152, a serine (S) at amino acid 153, a threonine (T) at amino acid 158, a lysine (K) at amino acid 163, a arginine (R) at amino acid 169, a tryptophan (W) at amino acid 306, a phenylalanine (F) at amino acid 308, and a asparagine (N) at amino acid 319, wherein the amino acid positions are numbered with respect to SEQ ID NO: 1.

[0190] Embodiment 8. The method of Embodiment 2, wherein the AAV viral vector comprises an AAV capsid protein comprising or consisting of the amino acid sequence of SED ID NO: 164 or an amino acid sequence that is up to 1, 2, 3, 4, 5, 6, 7, 8, 9, or 10 amino acids different from SEQ ID NO: 164.

[0191] Embodiment 9. The method of Embodiment 2, wherein the AAV viral vector comprises an AAV capsid protein comprising or consisting of the amino acid sequence of SED ID NO: 67 or an amino acid sequence that is up to 1, 2, 3, 4, 5, 6, 7, 8, 9, or 10 amino acids different from SEQ ID NO: 67.

[0192] Embodiment 10. The method of Embodiment 2, wherein the AAV viral vector comprises an AAV capsid protein comprising or consisting of the amino acid sequence of SED ID NO: 3 or an amino acid sequence that is up to 2, 2, 3, 4, 5, 6, 7, 8, 9, or 10 amino acids different from SEQ ID NO: 3.

[0193] Embodiment 11. The method of any one of Embodiments 2-3 and 10, wherein the AAV capsid protein comprises a VP3 portion comprising variable regions (VR) I to IX wherein:

(a) VR-II comprises amino acid sequence
(SEQ ID NO: 54)
DNNGVK,
(b) VR-III comprises amino acid sequence
(SEQ ID NO: 55)
NDGS,
(c) VR-IV comprises amino acid sequence
(SEQ ID NO: 56)
INGSGQNQQT
or
(SEQ ID NO: 171)
QSTGGTAGTQQ,
(d) VR-V comprises amino acid sequence
(SEQ ID NO: 57)
RVSTTTGQNNNSNFAWTA,
(e) VR-VI comprises amino acid sequence
(SEQ ID NO: 58)
HKEGEDRFFPLSG,
(f) VR-VII comprises amino acid sequence
(SEQ ID NO: 59)
KQNAARDNADYSDV,
(g) VR-VIII comprises amino acid sequence
(SEQ ID NO: 60)
ADNLQQQNTAPQI,
and
(h) VR-IX comprises amino acid sequence
(SEQ ID NO: 61)
NYYKSTSVDF.

[0194] Embodiment 12. The method of Embodiment 11, wherein the VR-I region comprises SASTGAS (SEQ ID NO. 52), NSTSGGSS (SEQ ID NO. 53), SSTSGGSS (SEQ ID NO. 87), or NGTSGGST (SEQ ID NO: 170).

[0195] Embodiment 13. The method of any one of Embodiments 1-11, wherein the ophthalmic disease or disorder is selected from the group consisting of dominant optic atrophy, retinitis pigmentosa, macular degeneration, an eye disorder related to mutations in the bestrophin-1 (BEST-1) gene, Leber congenital amaurosis, cone-rod dystrophy, Stargardt disease, choroideremia, Usher Syndrome, retinoschisis, Bietti's Crystalline Dystrophy and Achromatopsia.

[0196] Embodiment 14. The method of Embodiment 13, wherein the retinitis pigmentosa is autosomal recessive, autosomal dominant, or X-linked.

[0197] Embodiment 15. The method of Embodiment 13, wherein the eye disorder related to mutations in the BEST-1 gene is vitelliform macular dystrophy, age-related macular degeneration, autosomal dominant vitreoretinochoroidopathy, glaucoma, or cataract.

[0198] Embodiment 16. The method of any one of Embodiments 1-15, wherein the AAV viral vector comprises an AAV vector genome encoding a gene selected from SPATA7, LRAT, TULP1, AIPL1, RPGR, AIPL1, ABCA4, CHM, MY07A, CDH23, USH2A, CLRN1, RS1, CYP4V2, CNGA3, CNGB3, GNAT2, RHO, PDE6B, PDE6C, PDE6H, OPA1, OPA3, and BEST-1.

[0199] Embodiment 17. The method of any one of Embodiments 1-15, wherein the AAV viral vector comprises an AAV vector encoding an antisense RNA, microRNA, siRNA, or guide RNA (gRNA).

[0200] Embodiment 18. The method of any one of Embodiments 1-17, wherein the ophthalmic disease or disorder is related to a dysfunction of optic nerve.

[0201] Embodiment 19. The method of any one of Embodiments 1-17, wherein the ophthalmic disease or disorder is Dominant Optic Atrophy.

[0202] Embodiment 20. The method of Embodiment 19, wherein the AAV viral vector comprises an AAV vector genome comprising an OPA1 or OPA3 transgene.

[0203] Embodiment 21. The method of any one of Embodiments 1-17, wherein the ophthalmic disease or disorder is Retinoschisis.

[0204] Embodiment 22. The method of Embodiment 21, wherein the AAV viral vector comprises an AAV vector genome comprising a RS1 transgene.

[0205] Embodiment 23. The method of any one of Embodiments 1-22, wherein the para-retinal administration comprises injecting at a distance of between 0-13 millimeters (mm), between 0-10 mm, between 0-5 mm, or between 0-3 mm, from the surface of the retina in the posterior vitreous cavity of the eye.

[0206] Embodiment 23.1. The method of any one of Embodiments 1-22, wherein the para-retinal administration comprises injecting at a distance of between 0-13 mm from the surface of the retina in the posterior vitreous cavity of the eye.

[0207] Embodiment 23.2. The method of any one of Embodiments 1-22, wherein the para-retinal administration comprises injecting at a distance of between 0-10 mm from the surface of the retina in the posterior vitreous cavity of the eye.

[0208] Embodiment 23.3. The method of any one of Embodiments 1-22, wherein the para-retinal administration comprises injecting at a distance of between 0-5 mm from the surface of the retina in the posterior vitreous cavity of the eye.

[0209] Embodiment 23.4. The method of any one of Embodiments 1-22, wherein the para-retinal administration comprises injecting at a distance of between 0-3 mm from the surface of the retina in the posterior vitreous cavity of the eye.

[0210] Embodiment 24. The method of any one of Embodiments 1-23.4, wherein the subject is a human.

[0211] Embodiment 25. A nucleic acid encoding an AAV capsid protein comprising a VP3 portion, wherein the VP3 portion comprises variable regions (VR) I to IX wherein:

(a) VR-II comprises amino acid sequence
(SEQ ID NO: 54)
DNNGVK,
(b) VR-III comprises amino acid sequence
(SEQ ID NO: 55)
NDGS,
(c) VR-IV comprises amino acid sequence
(SEQ ID NO: 171)
QSTGGTAGTQQ,
(d) VR-V comprises amino acid sequence
(SEQ ID NO: 57)
RVSTTTGQNNNSNFAWTA,
(e) VR-VI comprises amino acid sequence
(SEQ ID NO: 58)
HKEGEDRFFPLSG,
(f) VR-VII comprises amino acid sequence
(SEQ ID NO: 59)
KQNAARDNADYSDV,
(g) VR-VIII comprises amino acid sequence
(SEQ ID NO: 60)
ADNLQQQNTAPQI,
and
(h) VR-IX comprises amino acid sequence
(SEQ ID NO: 61)
NYYKSTSVDF.

[0212] Embodiment 26. The nucleic acid of Embodiment 25, wherein the VR-I region comprises NGTSGGST (SEQ ID NO: 170).

[0213] Embodiment 27. The nucleic acid of Embodiment 25, wherein the VP3 portion has the amino acid sequence of SEQ ID NO: 166.

[0214] Embodiment 28. The nucleic acid of any one of Embodiments 25-27, wherein the AAV capsid protein further comprises i) a VP2 portion or ii) a VP1 portion and a VP2 portion.

[0215] Embodiment 29. The nucleic acid of any one of Embodiments 25-27, wherein the encoded AAV capsid protein comprises an amino acid sequence at least 95%, at least 96%, at least 97%, at least 98%, at least 99%, or 100% identical to SEQ ID NO: 164 or an amino acid sequence having up to 1, 2, 3, 4, 5, 6, 7, 8, 9, or 10 amino acids different from SEQ ID NO: 164.

[0216] Embodiment 30. The nucleic acid of any one of Embodiments 25-27, wherein the encoded AAV capsid protein comprises an amino acid sequence at least 95%, at least 96%, at least 97%, at least 98%, at least 99%, or 100% identical to SEQ ID NO: 165 or an amino acid sequence having up to 1, 2, 3, 4, 5, 6, 7, 8, 9, or 10 amino acids different from SEQ ID NO: 165.

[0217] Embodiment 31. The nucleic acid of any one of Embodiments 25-27, wherein the encoded AAV capsid protein comprises an amino acid sequence at least 95%, at least 96%, at least 97%, at least 98%, at least 99%, or 100% identical to SEQ ID NO: 166 or an amino acid sequence having up to 1, 2, 3, 4, 5, 6, 7, 8, 9, or 10 amino acids different from SEQ ID NO: 166.

[0218] Embodiment 32. The nucleic acid of any one of Embodiments 25-31, wherein the nucleic acid sequence is at least 95% identical to the nucleotide sequence selected from SEQ ID NOs: 167-169.

[0219] Embodiment 33. The nucleic acid of any one of Embodiments 25-31, wherein the nucleic acid sequence is 100% identical to the nucleotide sequence selected from SEQ ID NOs: 167-169.

[0220] Embodiment 34. A vector comprising the nucleic acid of any one of Embodiments 25-33.

[0221] Embodiment 35. An AAV capsid protein encoded by the nucleic acid of any one of Embodiments 25-33.

[0222] Embodiment 36. The AAV capsid protein of Embodiment 35, wherein the protein comprises the amino acid sequence of SEQ ID NO: 164, 165 or 166, or an amino acid sequence having up to 1, 2, 3, 4, 5, 6, 7, 8, 9, or 10 amino acids different from SEQ ID NO: 164, 165 or 166.

[0223] Embodiment 37. An AAV viral vector comprising the AAV capsid protein encoded by the nucleic acid of any one of Embodiments 25-33 and an AAV vector genome, wherein the AAV vector genome comprises, in 5′ to 3′ orientation:
[0224] (a) a first AAV inverted terminal repeat,
[0225] (b) a promoter,
[0226] (c) a heterologous nucleic acid,
[0227] (d) a polyadenylation signal, and
[0228] (e) a second AAV inverted terminal repeat.

[0229] Embodiment 38. The AAV viral vector of Embodiment 37, wherein the heterologous nucleic acid is operably linked to a constitutive promoter.

[0230] Embodiment 39. The AAV viral vector of Embodiment 37 or 38, wherein the heterologous nucleic acid encodes a polypeptide.

[0231] Embodiment 40. The AAV viral vector of Embodiment 37 or 38, wherein the heterologous nucleic acid encodes an antisense RNA, an siRNA, a microRNA, or a gRNA.

[0232] Embodiment 41. The AAV viral vector of any one of Embodiments 37-41, wherein the AAV capsid protein comprises the amino acid sequence of SEQ ID NO: 164, 165 or 166.

[0233] Embodiment 42. An AAV viral vector comprising
[0234] (i) an AAV capsid protein having the amino acid sequence of SEQ ID NO: 164 and
[0235] (ii) an AAV vector genome, wherein the AAV vector genome comprises, in 5′ to 3′ orientation:
   [0236] (a) a first AAV inverted terminal repeat,
   [0237] (b) a promoter,
   [0238] (c) a heterologous nucleic acid,
   [0239] (d) a polyadenylation signal; and
   [0240] (e) a second AAV inverted terminal repeat.

[0241] Embodiment 43. The AAV viral vector of any one of Embodiments 37-39 and 41-42, wherein the heterologous nucleic acid encodes a polypeptide having at least 90% identity to any one of SEQ ID NOs: 142-144 and 177-181.

[0242] Embodiment 44. The AAV viral vector of Embodiment 43, wherein the heterologous nucleic acid comprises a polynucleotide sequence having at least 90% identity to any one of SEQ ID NOs: 116-118 and 172-176.

[0243] Embodiment 45. A method of treating a disease or disorder comprising administering the AAV viral vector of any of Embodiments 37-44 to a subject.

[0244] Embodiment 46. The method of Embodiment 45, wherein the AAV viral vector is administered to the subject orally, rectally, transmucosally, inhalationally, transdermally, parenterally, intravenously, subcutaneously, intradermally, intramuscularly, intrapleurally, intracerebrally, intrathecally, intracerebrally, intraventricularly, intranasally, intra-aurally, intra-ocularly, peri-ocularly, topically, intralymphatically, intracistemally, intravitreally, para-retinally, or sub-retinally.

[0245] Embodiment 47. The method of Embodiment 45 or 46, wherein the disease or disorder is amyotrophic lateral sclerosis (ALS), spinal muscular atrophy (SMA), Fabry disease, Pompe disease, CLN3 disease (or Juvenile Neuronal Ceroid Lipofuscinosis), recessive dystrophic epidermolysis bullosa (RDEB), juvenile Batten disease, autosomal dominant disorder, muscular dystrophy, hemophilia A, hemophilia B, multiple sclerosis, diabetes mellitus, Gaucher disease cancer, arthritis, muscle wasting, heart disease, intimal hyperplasia, epilepsy, Huntington's disease, Parkinson's disease, Alzheimer's disease, cystic fibrosis, thalassemia, Hurler's Syndrome, Sly syndrome, Scheie Syndrome, Hurler-Scheie Syndrome, Hunter's Syndrome, Sanfilippo Syndrome A (mucopolysaccharidosis IIIA or MPS IIIA), Sanfilippo Syndrome B (mucopolysaccharidosis IIIB or MPS IIIB), Sanfilippo Syndrome C, Sanfilippo Syndrome D, Morquio Syndrome, Maroteaux-Lamy Syndrome, Krabbe's disease, phenylketonuria, Batten's disease, spinal cerebral ataxia, LDL receptor deficiency, hyperammonemia, arthritis, macular degeneration, retinitis pigmentosa, ceroid lipofuscinosis, neuronal, 1 (CLN1), adenosine deaminase deficiency, Dominant Optic Atrophy, Retinoschisis, Stargardt disease, Bietti's Crystalline Dystrophy or BEST vitelliform macular dystrophy.

[0246] Embodiment 48. The method of Embodiment 45 or 46, wherein the diseases or disorder is an ophthalmic disease or disorder.

[0247] Embodiment 49. The method of Embodiment 48, wherein the ophthalmic disease or disorder is selected from the group consisting of dominant optic atrophy, retinitis pigmentosa, macular degeneration, an eye disorder related to mutations in the bestrophin-1 (BEST-1) gene, Leber congenital amaurosis, cone-rod dystrophy, Stargardt disease, choroideremia, Usher Syndrome, retinoschisis, Bietti's Crystalline Dystrophy and Achromatopsia.

[0248] Embodiment 50. The method of any of Embodiments 45-49, wherein the subject is a human.

### EXAMPLES

### Example 1

### Characterization of Non-Human Primate Para-Retinal and Sub-Retinal Dosing Using Various AAV Viral Vectors

[0249] The transduction efficiency of the AAV viral vectors comprising an AAV204, AAV214, AAV214-D5, or AAV8 capsid via multiple ocular administration modes was assessed as described below.

[0250] All AAV viral vectors used in this example comprises a recombinant nucleic acid encoding an enhanced green fluorescence protein (“EGFP” or “GFP” hereinafter) reporter transgene that is operably linked to the CBh promoter.

[0251] To test transduction efficiency of the AAV viral vectors in vivo, non-human primates (NHP) Macaca fascicularis were dosed by para-retinal, sub-retinal, or intravitreal administration of the indicated AAV viral vectors. The dose/volume for each administration mode were:
[0252] Para-retinal dosing—1.0E+11 vg in 100 μL injection volume
[0253] Sub-retinal dosing—2.5E+10 vg in 100 μL injection volume
[0254] Intravitreal dosing—1.5E+12 vg in 150 μL injection volume
   Para-retinal administration was performed by layering virus on top of the retina between the vitreous and the inner limiting membrane, thus not creating a subretinal detachment. GFP expression was monitored using scanning laser ophthalmoscopy (SLO). SLO images were taken on samples collected 26-27 days post injection. At 28 days post-injection, eyes were collected, processed, and analyzed by immunohistochemistry.

[0255] FIGS. 2B-2E shows the SLO results of para-retinal injection of the AAV viral vectors comprising the capsid protein of AAV204 (FIG. 2B), AAV8 (FIG. 2C), AAV214 (FIG. 2D), or AAV214-D5 (FIG. 2E). Among the capsid proteins tested, the AAV viral vector comprising AAV204 capsid demonstrates robust transduction in the macular, papillomacular bundle, and retinal nerve fibers via para-retinal injection, with a much higher transduction efficiency compared to other tested capsids.

[0256] In addition, the para-retinal administration of the AAV viral vector comprising AAV204 capsid (FIG. 2B) also shows much higher local transduction efficiency (particularly for optical nerve transduction) compared to the traditional intravitreal administration of the same AAV viral vector (FIG. 2A).

[0257] To further compare the transduction efficiency of these two administration routes, the retinas were processed for imaging analysis (FIGS. 3A-3C). Again, retinas receiving para-retinal administration of the AAV viral vector comprising AAV204 capsid (FIGS. 3B-3C) demonstrates much more robust macular and optic nerve transduction than the retinas receiving intravitreal administration of the same AAV viral vector (FIG. 3A).

[0258] Further immunohistochemistry analysis of rhodopsin and GFP 1-month post para-retinal injection of AAV204 viral vectors (FIG. 3D) showed high GFP expression in retinal ganglion cells (RGCs) across the entire retina and nerve fibers with high GFP expression were observed along the retina and entering the optic nerve. In comparison, para-retinal injection of AAV8 viral vectors (FIG. 3D) showed much lower GFP expression in RGCs. As shown in FIGS. 3E-3F, para-retinal administration of AAV204 viral vectors also resulted in robust GFP expression in NHP fovea and along the papillomacular bundle between the macula and optic nerve. These results were consistent with the SLO analysis. Thus, para-retinal administration of AAV204 viral vector results in efficient transduction of target cells in the macula and foveal pit as well as retinal ganglion cells and the associated retinal nerve fibers extending to the optic nerve, at a dose that is at least 10-fold lower compared to intravitreal AAV injections commonly used in the field.

[0259] The transduction efficiency of the AAV viral vectors comprising the capsid protein of AAV8 (FIG. 4A; FIG. 4D), AAV214 (FIG. 4B; FIG. 4E), and AAV214-D5 (FIG. 4C; FIG. 4F) was also accessed. The results show that these 3 capsids display similar transduction efficiency when administered sub-retinally.

[0260] Conclusions: These results show that para-retinal injection of AAV vectors comprising AAV204 capsid can efficiently deliver the payload to the macula or optic nerve/retinal ganglion cell layer.

The application's sequence listing, which the Patent Office published only in electronic form, follows.

SEQUENCE LISTING (181 sequences)

SEQ ID NO: 1 - protein, 737 aa, Artificial Sequence
  AAV110 VPl
MAADGYLPDWLEDNLSEGIREWWDLKPGAPKPKANQQKQDDGRGLVLPGYKYLGPFNGLDKGEPVNAADAAALEHDKAYDQQLKAGDNPYLRYNHADAEFQERLQEDTSFGGNLGRAVFQAKKRVLEPLGLVEEGAKTAPGKKRPVEPSPQRSPDSSTGIGKKGQQPARKRLNFGQTGDSESVPDPQPLGEPPATPAAVGPTTMASGGGAPMADNNEGADGVGNASGNWHCDSTWLGDRVITTSTRTWALPTYNNHLYKQISSASTGASNDNHYFGYSTPWGYFDFNRFHCHFSPRDWQRLINNNWGFRPKRLNFKLFNIQVKEVTTNDGVTTIANNLTSTVQVFSDSEYQLPYVLGSAHQGCLPPFPADVFMIPQYGYLTLNNGSQAVGRSSFYCLEYFPSQMLRTGNNFTFSYTFEDVPFHSSYAHSQSLDRLMNPLIDQYLYYLNRTQNQSGSAQNKDLLFSRGSPAGMSVQPKNWLPGPCYRQQRVSKTKTDNNNSNFTWTGASKYNLNGRESIINPGTAMASHKDDKDKFFPMSGVMIFGKESAGASNTALDNVMITDEEEIKATNPVATERFGTVAVNLQSSSTDPATGDVHVMGALPGMVWQDRDVYLQGPIWAKIPHTDGHFHPSPLMGGFGLKHPPPQILIKNTPVPANPPAEFSATKFASFITQYSTGQVSVEIEWELQKENSKRWNPEVQYTSNYAKSANVDFTVDNNGLYTEPRPIGTRYLTRPL

SEQ ID NO: 2 - protein, 736 aa, Artificial Sequence
  AAV204 VP1
MAADGYLPDWLEDNLSEGIREWWDLKPGAPKPKANQQKQDDGRGLVLPGYKYLGPFNGLDKGEPVNAADAAALEHDKAYDQQLKAGDNPYLRYNHADAEFQERLQEDTSFGGNLGRAVFQAKKRVLEPLGLVEEGAKTAPGKKRPVEQSPQEPDSSSGIGKTGQQPAKKRLNFGQTGDSESVPDPQPLGEPPATPAAVGPTTMASGGGAPMADNNEGADGVGNASGNWHCDSTWLGDRVITTSTRTWALPTYNNHLYKQISSASTGASNDNHYFGYSTPWGYFDFNRFHCHFSPRDWQRLINNNWGFRPKRLNFKLFNIQVKEVTTNDGVTTIANNLTSTVQVFSDSEYQLPYVLGSAHQGCLPPFPADVFMIPQYGYLTLNNGSQAVGRSSFYCLEYFPSQMLRTGNNFTFSYTFEDVPFHSSYAHSQSLDRLMNPLIDQYLYYLNRTQNQSGSAQNKDLLFSRGSPAGMSVQPKNWLPGPCYRQQRVSKTKTDNNNSNFTWTGASKYNLNGRESIINPGTAMASHKDDKDKFFPMSGVMIFGKESAGASNTALDNVMITDEEEIKATNPVATERFGTVAVNLQNSSTDPATGDVHVMGALPGMVWQDRDVYLQGPIWAKIPHTDGHFHPSPLMGGFGLKHPPPQILIKNTPVPANPPAEFSATKFASFITQYSTGQVSVEIEWELQKENSKRWNPEVQYTSNYAKSANVDFTVDNNGLYTEPRPIGTRYLTRPL

SEQ ID NO: 3 - protein, 735 aa, Artificial Sequence
  AAV214 VPl
MAADGYLPDWLEDNLSEGIREWWALKPGAPKPKANQQKQDDGRGLVLPGYKYLGPFNGLDKGEPVNAADAAALEHDKAYDQQLKAGDNPYLRYNHADAEFQERLQEDTSFGGNLGRAVFQAKKRVLEPFGLVEEGAKTAPGKKRPVEQSPQEPDSSSGIGKTGQQPAKKRLNFGQTGDSESVPDPQPLGEPPATPAAVGPTTMASGGGAPMADNNEGADGVGNASGNWHCDSTWLGDRVITTSTRTWALPTYNNHLYKQISSASTGASNDNHYFGYSTPWGYFDFNRFHCHFSPRDWQRLINNNWGFRPKRLNFKLFNIQVKEVTDNNGVKTIANNLTSTVQVFTDSDYQLPYVLGSAHQGCLPPFPADVFMIPQYGYLTLNDGSQAVGRSSFYCLEYFPSQMLRTGNNFTFSYTFEDVPFHSSYAHSQSLDRLMNPLIDQYLYYLSKTINGSGQNQQTLKFSQGGPNTMANQAKNWLPGPCYRQQRVSTTTGQNNNSNFAWTAGTKYHLNGRNSLMNPGPAMASHKEGEDRFFPLSGSLIFGKQNAARDNADYSDVMLTSEEEIKTTNPVATEEYGIVADNLQQQNTAPQIGTVNSQGALPGMVWQNRDVYLQGPIWAKIPHTDGNFHPSPLMGGFGLKHPPPQILIKNTPVPADPPTTFNQSKLNSFITQYSTGQVSVEIEWELQKENSKRWNPEIQYTSNYYKSTSVDFAVNTEGVYSEPHPIGTRYLTRPL

SEQ ID NO: 4 - DNA, 4287 bp, Artificial Sequence
  CFTRdeltaR
atgcagagaagccccctggagaaggcctctgtggtgagcaagctgttcttcagctggaccagacccatcctgagaaagggctacagacagagactggagctgtctgacatctaccagatcccctctgtggactctgctgacaacctgtctgagaagctggagagagagtgggacagagagctggccagcaagaagaaccccaagctgatcaatgccctgagaagatgcttcttctggagattcatgttctatggcatcttcctgtacctgggggaggtgaccaaggctgtgcagcccctgctgctgggcagaatcattgccagctatgaccctgacaacaaggaggagagaagcattgccatctacctgggcattggcctgtgcctgctgttcattgtgagaaccctgctgctgcaccctgccatctttggcctgcaccacattggcatgcagatgagaattgccatgttcagcctgatctacaagaagaccctgaagctgagcagcagagtgctggacaagatcagcattggccagctggtgagcctgctgagcaacaacctgaacaagtttgatgagggcctggccctggcccactttgtgtggattgcccccctgcaggtggccctgctgatgggcctgatctgggagctgctgcaggcctctgccttctgtggcctgggcttcctgattgtgctggccctgttccaggctggcctgggcagaatgatgatgaagtacagagaccagagagctggcaagatctctgagagactggtgatcacctctgagatgattgagaacatccagtctgtgaaggcctactgctgggaggaggccatggagaagatgattgagaacctgagacagacagagctgaagctgaccagaaaggctgcctatgtgagatacttcaacagctctgccttcttcttctctggcttctttgtggtgttcctgtctgtgctgccctatgccctgatcaagggcatcatcctgagaaagatcttcaccaccatcagcttctgcattgtgctgagaatggctgtgaccagacagttcccctgggctgtgcagacctggtatgacagcctgggggccatcaacaagatccaggacttcctgcagaagcaggagtacaagaccctggagtacaacctgaccaccacagaggtggtgatggagaatgtgacagccttctgggaggagggctttggggagctgtttgagaaggccaagcagaacaacaacaacagaaagaccagcaatggggatgacagcctgttcttcagcaacttcagcctgctgggcacccctgtgctgaaggacatcaacttcaagattgagagaggccagctgctggctgtggctggcagcacaggggctggcaagaccagcctgctgatgatgatcatgggggagctggagccctctgagggcaagatcaagcactctggcagaatcagcttctgcagccagttcagctggatcatgcctggcaccatcaaggagaacatcatctttggggtgagctatgatgagtacagatacagatctgtgatcaaggcctgccagctggaggaggacatcagcaagtttgctgagaaggacaacattgtgctgggggaggggggcatcaccctgtctgggggccagagagccagaatcagcctggccagagctgtgtacaaggatgctgacctgtacctgctggacagcccctttggctacctggatgtgctgacagagaaggagatctttgagagctgtgtgtgcaagctgatggccaacaagaccagaatcctggtgaccagcaagatggagcacctgaagaaggctgacaagatcctgatcctgcatgagggcagcagctacttctatggcaccttctctgagctgcagaacctgcagcctgacttcagcagcaagctgatgggctgtgacagctttgaccagttctctgctgagagaagaaacagcatcctgacagagaccctgcacagattcagcctggagggggatgcccctgtgagctggacagagaccaagaagcagagcttcaagcagacaggggagtttggggagaagagaaagaacagcatcctgaaccccatcaacagcaccctgcaggccagaagaagacagtctgtgctgaacctgatgacccactctgtgaaccagggccagaacatccacagaaagaccacagccagcaccagaaaggtgagcctggccccccaggccaacctgacagagctggacatctacagcagaagactgagccaggagacaggcctggagatctctgaggagatcaatgaggaggacctgaaggagtgcttctttgatgacatggagagcatccctgctgtgaccacctggaacacctacctgagatacatcacagtgcacaagagcctgatctttgtgctgatctggtgcctggtgatcttcctggctgaggtggctgccagcctggtggtgctgtggctgctgggcaacacccccctgcaggacaagggcaacagcacccacagcagaaacaacagctatgctgtgatcatcaccagcaccagcagctactatgtgttctacatctatgtgggggtggctgacaccctgctggccatgggcttcttcagaggcctgcccctggtgcacaccctgatcacagtgagcaagatcctgcaccacaagatgctgcactctgtgctgcaggcccccatgagcaccctgaacaccctgaaggctgggggcatcctgaacagattcagcaaggacattgccatcctggatgacctgctgcccctgaccatctttgacttcatccagctgctgctgattgtgattggggccattgctgtggtggctgtgctgcagccctacatctttgtggccacagtgcctgtgattgtggccttcatcatgctgagagcctacttcctgcagaccagccagcagctgaagcagctggagtctgagggcagaagccccatcttcacccacctggtgaccagcctgaagggcctgtggaccctgagagcctttggcagacagccctactttgagaccctgttccacaaggccctgaacctgcacacagccaactggttcctgtacctgagcaccctgagatggttccagatgagaattgagatgatctttgtgatcttcttcattgctgtgaccttcatcagcatcctgaccacaggggagggggagggcagagtgggcatcatcctgaccctggccatgaacatcatgagcaccctgcagtgggctgtgaacagcagcattgatgtggacagcctgatgagatctgtgagcagagtgttcaagttcattgacatgcccacagagggcaagcccaccaagagcaccaagccctacaagaatggccagctgagcaaggtgatgatcattgagaacagccatgtgaagaaggatgacatctggccctctgggggccagatgacagtgaaggacctgacagccaagtacacagaggggggcaatgccatcctggagaacatcagcttcagcatcagccctggccagagagtgggcctgctgggcagaacaggctctggcaagagcaccctgctgtctgccttcctgagactgctgaacacagagggggagatccagattgatggggtgagctgggacagcatcaccctgcagcagtggagaaaggcctttggggtgatcccccagaaggtgttcatcttctctggcaccttcagaaagaacctggacccctatgagcagtggtctgaccaggagatctggaaggtggctgatgaggtgggcctgagatctgtgattgagcagttccctggcaagctggactttgtgctggtggatgggggctgtgtgctgagccatggccacaagcagctgatgtgcctggccagatctgtgctgagcaaggccaagatcctgctgctggatgagccctctgcccacctggaccctgtgacctaccagatcatcagaagaaccctgaagcaggcctttgctgactgcacagtgatcctgtgtgagcacagaattgaggccatgctggagtgccagcagttcctggtgattgaggagaacaaggtgagacagtatgacagcatccagaagctgctgaatgagagaagcctgttcagacaggccatcagcccctctgacagagtgaagctgttcccccacagaaacagcagcaagtgcaagagcaagccccagattgctgccctgaaggaggagaccgaggaggaggtgcaggacaccagactgtaa

SEQ ID NO: 5 - DNA, 2859 bp, Artificial Sequence
  GAA
atgggagtccgccacccgccctgctcacatcgcctgcttgctgtctgtgccctcgtgtcacttgctaccgccgcgctgcttggtcacattctgctgcacgactttttactagttccgagggaactgtcgggatccagccccgtgctcgaggaaactcaccccgcgcaccaacagggggcgtccaggccgggaccgcgcgacgcccaggcccacccgggccggcctcgggccgtgccaactcagtgcgatgtgccgccgaactcccgcttcgactgtgcgcctgacaaggccataacccaggaacagtgcgaagcacgcggctgctgctatattccggcgaagcagggcttgcagggtgcccaaatgggtcagccttggtgcttctttcccccgtcgtacccctcgtacaagctggagaacctgagcagcagcgaaatggggtacaccgccactctgacccggacgaccccgaccttcttcccgaaagacatcctgaccctgcggctggatgtgatgatggaaactgagaacagactgcacttcactatcaaggaccccgcgaaccgcagatatgaggtgccactggaaacccctcatgtgcattcccgggccccatcccctctgtactcggtggaattctccgaagaacccttcggggtcattgtgcgccggcagcttgatggccgggtcctgctcaacaccaccgtggcaccccttttcttcgctgaccagttcctccagctgagcacctcgctgccgagccagtacatcaccggactggccgagcacctctcccctctgatgctgtccactagctggactaggatcactctgtggaaccgggatctggcccctaccccgggcgcgaacctgtacggatcgcaccccttctacctggccctcgaggacggaggctccgcccacggagtgttcctgctgaactccaacgctatggacgtggtgctccagccgtcccctgcactgtcctggcggagcacagggggtattctggatgtctacatcttcctcggcccggagccaaagtccgtggtgcaacagtatctggatgtcgtgggttacccattcatgccgccatactggggccttggcttccacctgtgccgctggggatacagctccaccgccatcactagacaggtcgtggaaaacatgactagagcccacttccccctcgatgtccagtggaatgacctggactacatggattccagacgcgacttcactttcaacaaggatggattcagagatttccccgctatggtccaagaactgcaccagggtggccggcggtacatgatgattgtggaccccgccatttcaagctccggaccagcgggctcgtaccggccctacgacgaaggtttgcgccgcggcgtgttcatcactaacgaaaccggccagccactgattgggaaggtctggcctggaagcaccgcgttcccggacttcactaacccaacggccttggcgtggtgggaggacatggtggccgaattccacgaccaagtcccattcgacggaatgtggatcgacatgaacgagcccagcaacttcatccgaggctccgaggacggctgccctaacaacgaacttgagaaccctccgtacgtgcctggcgtcgtcggcggaacactgcaggccgctacgatctgtgcctcatcgcatcagttcctgtcaacccactacaacctccataatctgtacggcctcaccgaagccatcgcctcccaccgggccctggtcaaggcccgggggactaggcccttcgtgattagccggagcactttcgccggacacggaagatacgccggacattggaccggcgacgtgtggtcatcgtgggagcagctcgcctcctccgtccccgaaatcctgcagttcaatctcctgggagtccccctcgtgggcgcggacgtgtgcggattcctgggcaatacctctgaggagctgtgcgtgagatggacccagctgggggcgttctaccccttcatgcggaaccacaactcactgctgtccctgcctcaagagccgtactcattctccgagccggcacaacaggccatgcgaaaggctctgaccctccgctatgcgctcttgccccacctctacactctgtttcaccaagcccatgtcgcgggcgaaacagtggccagaccactctttctggaattcccaaaggactcctcaacctggactgtggatcatcagctgctctggggagaggcactgctgatcaccccggtgctccaagccggaaaggcggaagtgaccggatacttccctctcggtacttggtacgacctccaaaccgtgccggtcgaggccctgggcagcttgcctccgccgccggctgccccgcgggagcctgcaatccactccgaggggcaatgggtgaccctccctgcaccactggacaccatcaacgtgcacctccgggccggctacatcatcccgctgcaaggaccgggtctgactaccaccgaatcccggcagcagcccatggcactggccgtggccctgaccaagggaggggaagcacggggagaactcttttgggacgatggagaatccctggaagtgctcgagcggggagcctacactcaagtcatctttcttgcccgcaacaacaccatcgtgaacgaattggtccgcgtgacctccgagggggccggactccagctgcaaaaagtgaccgtgctgggggtggcaaccgccccgcaacaagtgttgtctaacggagtgccggtgtccaacttcacctactcccctgataccaaagttctagatatttgcgtgagcctgctgatgggagaacagttcctggtgtcctggtgctga

SEQ ID NO: 6 - DNA, 2859 bp, Artificial Sequence; identical to SEQ ID NO: 5
  GAA codon-optimized nucleotide sequence 1 (GAA 15)

SEQ ID NO: 7 - DNA, 2859 bp, Artificial Sequence
  GAA Codon-optimized 2 (GAA21)
atgggagttagacaccctccatgtagccacagactgctggccgtgtgtgctctggtgtctctggctacagctgccctgctgggacatatcctgctgcacgacttcttactagttcccagagagctgtccggcagcagccctgtgctggaagaaacacaccctgcacatcagcagggcgcctctagacctggacctagagatgctcaggcccatcctggcagacctagagctgtgcccacacagtgtgacgtgccacctaacagcagattcgactgcgcccctgacaaggccatcacacaagagcagtgtgaagccagaggctgctgctacatccctgccaaacaaggactgcagggcgctcagatgggacagccctggtgcttcttcccaccatcttaccccagctacaagctggaaaacctgagcagcagcgagatgggctacaccgccacactgaccagaaccacacctacattcttcccgaaggacatcctgacactgcggctggacgtgatgatggaaaccgagaaccggctgcacttcaccatcaaggaccccgccaatcggagatacgaggtgccactggaaacccctcacgtgcactctagagccccatctccactgtacagcgtggaattcagcgaggaacccttcggcgtgatcgtgcggagacagctggatggaagagtgctgctgaacaccacagtggcccctctgttcttcgccgaccagtttctgcagctgtccaccagcctgcctagccagtatatcacaggcctggccgagcacctgtctccactgatgctgtctaccagctggacccggatcaccctgtggaacagggatcttgctcctacacctggcgccaacctgtacggctctcaccctttttatctggccctggaagatggcggatctgcccacggtgtctttctgctgaactccaacgccatggacgtggtgctgcagccatctcctgctctgtcttggagaagcacaggcggcatcctggacgtgtacatctttctgggccccgagcctaagagcgtggtgcagcagtatctggacgtcgtgggctaccccttcatgcctccttattggggcctgggcttccacctgtgcagatggggatacagcagcaccgccatcaccagacaggtggtggaaaacatgacccgggctcacttcccactggatgtgcagtggaacgacctggactacatggacagcagacgggacttcaccttcaacaaggacggcttcagagacttccccgccatggtgcaagaactgcaccaaggcggcagacggtacatgatgatcgtggatccagccatcagctctagcggccctgccggctcttacagaccttacgatgagggcctgagaagaggcgtgttcatcaccaacgagacaggccagcctctgatcggcaaagtgtggcctggcagcacagcctttccagacttcacaaaccccaccgctctggcttggtgggaagatatggtggccgagtttcacgatcaggtgcccttcgacggcatgtggatcgacatgaacgagcccagcaacttcatccggggcagcgaggatggctgccccaacaacgaactggaaaatcctccttacgtgcccggcgttgtcggcggaacacttcaggccgctacaatctgtgccagcagccaccagttcctcagcacccactacaacctgcacaatctgtatggcctgaccgaggccattgccagccatagagccctggttaaggccaggggcaccagacctttcgtgatcagcagaagcaccttcgccggccacggcagatatgccggacattggacaggcgacgtgtggtctagttgggagcagctggctagcagcgtgccagagatcctgcagttcaatctgctgggcgtgccactcgtgggagccgatgtttgtggcttcctgggcaacacctccgaggaactgtgtgtgcgttggacacagctgggcgccttctatcccttcatgagaaaccacaacagccttctcagcctgccacaagagccctacagcttctctgagcctgcacagcaggccatgagaaaggccctgactctgagatacgctctgctgccccacctgtacaccctgtttcaccaggctcatgtggccggggagacagtggctagacctctgttcctggaattccccaaggacagctccacctggaccgtggatcatcagctgctgtggggagaagccctgctcatcacacctgttctgcaggccggaaaggccgaagtgaccggctattttcctctcggcacttggtacgacctgcagaccgtgcctgttgaggctctgggatctcttcctccacctcctgccgctcctagagagcctgccattcactctgaaggccagtgggttaccctgcctgctcctctggacaccatcaacgtgcacctgagagctggctacatcatccctctgcaaggccctggcctgacaaccaccgaatctagacagcagcccatggctctggccgtggctttgacaaaaggcggagaggctagaggcgagctgttctgggatgatggcgagagcctggaagtgctggaacggggcgcttatacccaagtgatcttcctggccagaaacaacaccatcgtgaacgaactcgtgcgcgtgaccagtgaaggtgctggactgcaactgcagaaagtgaccgtgctcggagtggccacagcacctcagcaggttctgtctaatggcgtgcccgtgtccaacttcacatacagccccgacaccaaggtcctggacatctgtgtgtcactgctgatgggcgagcagttcctggtgtcctggtgttga

SEQ ID NO: 8 - protein, 952 aa, Homo sapiens
  MISC_FEATURE (1)..(952): Acid Alpha-Glucosidase (GAA)
MGVRHPPCSHRLLAVCALVSLATAALLGHILLHDFLLVPRELSGSSPVLEETHPAHQQGASRPGPRDAQAHPGRPRAVPTQCDVPPNSRFDCAPDKAITQEQCEARGCCYIPAKQGLQGAQMGQPWCFFPPSYPSYKLENLSSSEMGYTATLTRTTPTFFPKDILTLRLDVMMETENRLHFTIKDPANRRYEVPLETPHVHSRAPSPLYSVEFSEEPFGVIVRRQLDGRVLLNTTVAPLFFADQFLQLSTSLPSQYITGLAEHLSPLMLSTSWTRITLWNRDLAPTPGANLYGSHPFYLALEDGGSAHGVFLLNSNAMDVVLQPSPALSWRSTGGILDVYIFLGPEPKSVVQQYLDVVGYPFMPPYWGLGFHLCRWGYSSTAITRQVVENMTRAHFPLDVQWNDLDYMDSRRDFTFNKDGFRDFPAMVQELHQGGRRYMMIVDPAISSSGPAGSYRPYDEGLRRGVFITNETGQPLIGKVWPGSTAFPDFTNPTALAWWEDMVAEFHDQVPFDGMWIDMNEPSNFIRGSEDGCPNNELENPPYVPGVVGGTLQAATICASSHQFLSTHYNLHNLYGLTEAIASHRALVKARGTRPFVISRSTFAGHGRYAGHWTGDVWSSWEQLASSVPEILQFNLLGVPLVGADVCGFLGNTSEELCVRWTQLGAFYPFMRNHNSLLSLPQEPYSFSEPAQQAMRKALTLRYALLPHLYTLFHQAHVAGETVARPLFLEFPKDSSTWTVDHQLLWGEALLITPVLQAGKAEVTGYFPLGTWYDLQTVPVEALGSLPPPPAAPREPAIHSEGQWVTLPAPLDTINVHLRAGYIIPLQGPGLTTTESRQQPMALAVALTKGGEARGELFWDDGESLEVLERGAYTQVIFLARNNTIVNELVRVTSEGAGLQLQKVTVLGVATAPQQVLSNGVPVSNFTYSPDTKVLDICVSLLMGEQFLVSWC

SEQ ID NO: 9 - DNA, 1290 bp, Artificial Sequence
  GLA
atgcagctgaggaacccagaactacatctgggctgcgcgcttgcgcttcgcttcctggccctcgtttcctgggacatccctggggctagagcactggacaatggattggcaaggacgcctaccatgggctggctgcactgggagcgcttcatgtgcaaccttgactgccaggaagagccagattcctgcatcagtgagaagctcttcatggagatggcagagctcatggtctcagaaggctggaaggatgcaggttatgagtacctctgcattgatgactgttggatggctccccaaagagattcagaaggcagacttcaggcagaccctcagcgctttcctcatgggattcgccagctagctaattatgttcacagcaaaggactgaagctagggatttatgcagatgttggaaataaaacctgcgcaggcttccctgggagttttggatactacgacattgatgcccagacctttgctgactggggagtagatctgctaaaatttgatggttgttactgtgacagtttggaaaatttggcagatggttataagcacatgtccttggccctgaataggactggcagaagcattgtgtactcctgtgagtggcctctttatatgtggccctttcaaaagcccaattatacagaaatccgacagtactgcaatcactggcgaaattttgctgacattgatgattcctggaaaagtataaagagtatcttggactggacatcttttaaccaggagagaattgttgatgttgctggaccagggggttggaatgacccagatatgttagtgattggcaactttggcctcagctggaatcagcaagtaactcagatggccctctgggctatcatggctgctcctttattcatgtctaatgacctccgacacatcagccctcaagccaaagctctccttcaggataaggacgtaattgccatcaatcaggaccccttgggcaagcaagggtaccagcttagacagggagacaactttgaagtgtgggaacgacctctctcaggcttagcctgggctgtagctatgataaaccggcaggagattggtggacctcgctcttataccatcgcagttgcttccctgggtaaaggagtggcctgtaatcctgcctgcttcatcacacagctcctccctgtgaaaaggaagctagggttctatgaatggacttcaaggttaagaagtcacataaatcccacaggcactgttttgcttcagctagaaaatacaatgcagatgtcattaaaagacttactttaa

SEQ ID NO: 10 - DNA, 1290 bp, Artificial Sequence
  GLA codon-optimized
atgcagctgagaaatcctgaactgcacctgggctgtgccctggctctgagatttctggctctggtgtcctgggacattcctggcgctagagccctggataatggcctggccagaacacctacaatgggctggctgcactgggagagattcatgtgcaacctggactgccaagaggaacccgacagctgcatcagcgagaagctgttcatggaaatggccgagctgatggtgtccgaaggctggaaggatgccggctacgagtacctgtgcatcgacgattgctggatggcccctcagagagattctgagggcagactgcaggccgatcctcagagatttcctcacggaatccggcagctggccaactacgtgcactctaagggactgaagctgggcatctacgccgacgtgggcaacaagacatgtgccggctttccaggcagcttcggctactacgatatcgacgcccagacctttgccgattggggcgtcgacctgctgaagttcgatggctgctactgcgacagcctggaaaacctggccgacggctacaaacacatgtctctggccctgaaccggaccggcagatctatcgtgtactcttgcgagtggcccctgtacatgtggcccttccagaagcctaactacaccgagatcagacagtactgcaaccactggcggaacttcgccgacatcgatgacagctggaagtccatcaagagcatcctggactggaccagcttcaatcaagagcggatcgtggatgtggctggcccaggcggatggaacgatcctgatatgctggtcatcggcaacttcggcctgagctggaatcagcaagtgacccagatggccctgtgggccattatggccgctcctctgttcatgagcaacgacctgagacacatcagccctcaggccaaggctctgctgcaggataaggacgtgatcgccatcaaccaggatcctctgggcaagcagggctatcagctgagacagggcgacaatttcgaagtgtgggaaagacctctgagcggcctggcttgggccgtcgccatgatcaatagacaagagatcggcggaccccggtcctatacaattgccgtggcttctctcggaaaaggcgtggcctgcaatcctgcctgctttatcacacagctgctccccgtgaagagaaagctgggcttttacgagtggaccagcagactgagatcccacatcaaccccacaggcactgttctgctgcaactggaaaacacaatgcagatgagcctgaaggacctgctgtag

SEQ ID NO: 11 - protein, 429 aa, Artificial Sequence
  GLA
MQLRNPELHLGCALALRFLALVSWDIPGARALDNGLARTPTMGWLHWERFMCNLDCQEEPDSCISEKLFMEMAELMVSEGWKDAGYEYLCIDDCWMAPQRDSEGRLQADPQRFPHGIRQLANYVHSKGLKLGIYADVGNKTCAGFPGSFGYYDIDAQTFADWGVDLLKFDGCYCDSLENLADGYKHMSLALNRTGRSIVYSCEWPLYMWPFQKPNYTEIRQYCNHWRNFADIDDSWKSIKSILDWTSFNQERIVDVAGPGGWNDPDMLVIGNFGLSWNQQVTQMALWAIMAAPLFMSNDLRHISPQAKALLQDKDVIAINQDPLGKQGYQLRQGDNFEVWERPLSGLAWAVAMINRQEIGGPRSYTIAVASLGKGVACNPACFITQLLPVKRKLGFYEWTSRLRSHINPTGTVLLQLENTMQMSLKDLL

SEQ ID NO: 12 - DNA, 1317 bp, Artificial Sequence
  CLN3
atgggaggctgtgcaggctcgcggcggcgcttttcggattccgagggggaggagaccgtcccggagccccggctccctctgttggaccatcagggcgcgcattggaagaacgcggtgggcttctggctgctgggcctttgcaacaacttctcttatgtggtgatgctgagtgccgcccacgacatccttagccacaagaggacatcgggaaaccagagccatgtggacccaggcccaacgccgatcccccacaacagctcatcacgatttgactgcaactctgtctctacggctgctgtgctcctggcggacatcctccccacactcgtcatcaaattgttggctcctcttggccttcacctgctgccctacagcccccgggttctcgtcagtgggatttgtgctgctggaagcttcgtcctggttgccttttctcattctgtggggaccagcctgtgtggtgtggtcttcgctagcatctcatcaggccttggggaggtcaccttcctctccctcactgccttctaccccagggccgtgatctcctggtggtcctcagggactgggggagctgggctgctgggggccctgtcctacctgggcctcacccaggccggcctctcccctcagcagaccctgctgtccatgctgggtatccctgccctgctgctggccagctatttcttgttgctcacatctcctgaggcccaggaccctggaggggaagaagaagcagagagcgcagcccggcagcccctcataagaaccgaggccccggagtcgaagccaggctccagctccagcctctcccttcgggaaaggtggacagtgttcaagggtctgctgtggtacattgttcccttggtcgtagtttactttgccgagtatttcattaaccagggactttttgaactcctctttttctggaacacttccctgagtcacgctcagcaataccgctggtaccagatgctgtaccaggctggcgtctttgcctcccgctcttctctccgctgctgtcgcatccgtttcacctgggccctggccctgctgcagtgcctcaacctggtgttcctgctggcagacgtgtggttcggctttctgccaagcatctacctcgtcttcctgatcattctgtatgaggggctcctgggaggcgcagcctacgtgaacaccttccacaacatcgccctggagaccagtgatgagcaccgggagtttgcaatggcggccacctgcatctctgacacactggggatctccctgtcggggctcctggctttgcctctgcatgacttcctctgccagctctcctga

SEQ ID NO: 13 - DNA, 1317 bp, Artificial Sequence
  CLN3 codon-optimized
atgggaggatgtgctgggtcaagaagacggtttagcgattccgaaggagaggagactgtgcctgagccaagactgcccctgctggatcaccagggagcacactggaagaacgcagtgggattctggctgctgggcctgtgcaacaacttcagctacgtggtcatgctgtccgccgcccacgacatcctgtcccacaagcggacctccggcaatcagtctcacgtggaccccggccctacaccaatcccccacaacagcagcagccggttcgactgtaattccgtgtctaccgcagccgtgctgctggcagacatcctgcccaccctggtcatcaagctgctggcaccactgggcctgcacctgctgccttattctccaagggtgctggtgagcggcatctgcgcagcaggcagcttcgtgctggtggcctttagccactccgtgggcacctctctgtgcggagtggtgtttgcaagcatcagctccggcctgggagaggtgaccttcctgagcctgacagccttttaccctcgcgccgtgatctcctggtggtctagcggcacaggaggagcaggcctgctgggcgccctgtcctatctgggcctgacccaggcaggcctgtccccacagcagacactgctgtctatgctgggcatccctgccctgctgctggcaagctacttcctgctgctgacctccccagaggcacaggaccccggaggagaggaggaggccgagagcgccgcaaggcagccactgatcaggaccgaggcaccagagtccaagcctggctcctctagctccctgtctctgcgggagagatggacagtgttcaagggcctgctgtggtacatcgtgcccctggtggtggtgtacttcgccgagtacttcatcaaccagggcctgtttgagctgctgttcttttggaatacctctctgagccacgcccagcagtaccggtggtatcagatgctgtatcaggcaggcgtgttcgcctcccggtctagcctgagatgctgtcggatcagattcacctgggcactggccctgctgcagtgcctgaacctggtgttcctgctggccgacgtgtggttcggctttctgccctctatctacctggtgtttctgatcatcctgtatgagggcctgctgggaggagcagcctatgtgaacaccttccacaatatcgccctggagacatctgacgagcacagagagtttgctatggccgccacctgtatcagcgatacactgggcatctctctgagcggactgctggctctgcctctgcatgactttctgtgccagctgagttaa

SEQ ID NO: 14 - protein, 438 aa, Homo sapiens
  MISC_FEATURE (1)..(438): Ceroid Lipofuscinosis, Neuronal 3 (CLN3)
MGGCAGSRRRFSDSEGEETVPEPRLPLLDHQGAHWKNAVGFWLLGLCNNFSYVVMLSAAHDILSHKRTSGNQSHVDPGPTPIPHNSSSRFDCNSVSTAAVLLADILPTLVIKLLAPLGLHLLPYSPRVLVSGICAAGSFVLVAFSHSVGTSLCGVVFASISSGLGEVTFLSLTAFYPRAVISWWSSGTGGAGLLGALSYLGLTQAGLSPQQTLLSMLGIPALLLASYFLLLTSPEAQDPGGEEEAESAARQPLIRTEAPESKPGSSSSLSLRERWTVFKGLLWYIVPLVVVYFAEYFINQGLFELLFFWNTSLSHAQQYRWYQMLYQAGVFASRSSLRCCRIRFTWALALLQCLNLVFLLADVWFGFLPSIYLVFLIILYEGLLGGAAYVNTFHNIALETSDEHREFAMAATCISDTLGISLSGLLALPLHDFLCQLS

SEQ ID NO: 15 - DNA, 2211 bp, Artificial Sequence
  AAV204 VP1
atggctgccgatggttatcttccagattggctcgaggacaacctctctgagggcattcgcgagtggtgggacttgaaacctggagccccgaagcccaaagccaaccagcaaaagcaggacgacggccggggtctggtgcttcctggctacaagtacctcggacccttcaacggactcgacaagggggagcccgtcaacgcggcggacgcagcggccctcgagcacgacaaggcctacgaccagcagctcaaagcgggtgacaatccgtacctgcggtataaccacgccgacgccgagtttcaggagcgtctgcaagaagatacgtcttttgggggcaacctcgggcgagcagtcttccaggccaagaagcgggttctcgaacctctcggtctggttgaggaaggcgctaagacggctcctggaaagaaacgtccggtagagcagtcaccacaagagccagactcctcctcgggcatcggcaagacaggccagcagcccgctaaaaagagactcaattttggtcagactggcgactcagagtcagtccccgacccacaacctctcggagaacctccagcaacccccgctgctgtgggacctactacaatggcttcaggcggtggcgcaccaatggcggacaataacgaaggcgccgacggagtgggtaatgcctcaggaaattggcattgcgattccacatggctgggcgacagagtcatcaccaccagcacccgaacatgggccttgcccacctataacaaccacctctacaagcaaatctccagtgcttcaacgggggccagcaacgacaaccactacttcggctacagcaccccctgggggtattttgatttcaacagattccactgccatttctcaccacgtgactggcagcgactcatcaacaacaattggggattccggcccaagagactcaacttcaagctcttcaacatccaagtcaaggaggtcacgacgaatgatggcgtcacgaccatcgctaataaccttaccagcacggttcaagtcttctcggactcggagtaccagttgccgtacgtcctcggctctgcgcaccagggctgcctccctccgttcccggcggacgtgttcatgattccgcagtacggctacctaacgctcaacaatggcagccaggcagtgggacggtcatccttttactgcctggaatatttcccatcgcagatgctgagaacgggcaataactttaccttcagctacaccttcgaggacgtgcctttccacagcagctacgcgcacagccagagcctggaccggctgatgaatcctctcatcgaccagtacctgtattacctgaacagaactcagaatcagtccggaagtgcccaaaacaaggacttgctgtttagccgggggtctccagctggcatgtctgttcagcccaaaaactggctacctggaccctgttaccggcagcagcgcgtttctaaaacaaaaacagacaacaacaacagcaactttacctggacaggtgcttcaaaatataaccttaatgggcgtgaatctataatcaaccctggcactgctatggcctcacacaaagacgacaaagacaagttctttcccatgagcggtgtcatgatttttggaaaggagagcgccggagcttcaaacactgcattggacaatgtcatgatcacagacgaagaggaaatcaaagccactaaccccgtggccaccgaaagatttgggactgtggcagtcaatctccagaacagcagcacagaccctgcgaccggagatgtgcatgttatgggagccttacctggaatggtgtggcaagacagagacgtatacctgcagggtcctatttgggccaaaattcctcacacggatggacactttcacccgtctcctctcatgggcggctttggacttaagcacccgcctcctcagatcctcatcaaaaacacgcctgttcctgcgaatcctccggcagagttttcggctacaaagtttgcttcattcatcacccagtattccacaggacaagtgagcgtggagattgaatgggagctgcagaaagaaaacagcaaacgctggaatcccgaagtgcagtatacatctaactatgcaaaatctgccaacgttgatttcactgtagacaacaatggactttatactgagcctcgccccattggcacccgttacctcacccgtcccctgtaa

SEQ ID NO: 16 - DNA, 1605 bp, Artificial Sequence
  AAV204 VP3
atggcttcaggcggtggcgcaccaatggcggacaataacgaaggcgccgacggagtgggtaatgcctcaggaaattggcattgcgattccacatggctgggcgacagagtcatcaccaccagcacccgaacatgggccttgcccacctataacaaccacctctacaagcaaatctccagtgcttcaacgggggccagcaacgacaaccactacttcggctacagcaccccctgggggtattttgatttcaacagattccactgccatttctcaccacgtgactggcagcgactcatcaacaacaattggggattccggcccaagagactcaacttcaagctcttcaacatccaagtcaaggaggtcacgacgaatgatggcgtcacgaccatcgctaataaccttaccagcacggttcaagtcttctcggactcggagtaccagttgccgtacgtcctcggctctgcgcaccagggctgcctccctccgttcccggcggacgtgttcatgattccgcagtacggctacctaacgctcaacaatggcagccaggcagtgggacggtcatccttttactgcctggaatatttcccatcgcagatgctgagaacgggcaataactttaccttcagctacaccttcgaggacgtgcctttccacagcagctacgcgcacagccagagcctggaccggctgatgaatcctctcatcgaccagtacctgtattacctgaacagaactcagaatcagtccggaagtgcccaaaacaaggacttgctgtttagccgggggtctccagctggcatgtctgttcagcccaaaaactggctacctggaccctgttaccggcagcagcgcgtttctaaaacaaaaacagacaacaacaacagcaactttacctggacaggtgcttcaaaatataaccttaatgggcgtgaatctataatcaaccctggcactgctatggcctcacacaaagacgacaaagacaagttctttcccatgagcggtgtcatgatttttggaaaggagagcgccggagcttcaaacactgcattggacaatgtcatgatcacagacgaagaggaaatcaaagccactaaccccgtggccaccgaaagatttgggactgtggcagtcaatctccagaacagcagcacagaccctgcgaccggagatgtgcatgttatgggagccttacctggaatggtgtggcaagacagagacgtatacctgcagggtcctatttgggccaaaattcctcacacggatggacactttcacccgtctcctctcatgggcggctttggacttaagcacccgcctcctcagatcctcatcaaaaacacgcctgttcctgcgaatcctccggcagagttttcggctacaaagtttgcttcattcatcacccagtattccacaggacaagtgagcgtggagattgaatgggagctgcagaaagaaaacagcaaacgctggaatcccgaagtgcagtatacatctaactatgcaaaatctgccaacgttgatttcactgtagacaacaatggactttatactgagcctcgccccattggcacccgttacctcacccgtcccctgtaa

SEQ ID NO: 17 - protein, 534 aa, Artificial Sequence
  AAV204 VP3
MASGGGAPMADNNEGADGVGNASGNWHCDSTWLGDRVITTSTRTWALPTYNNHLYKQISSASTGASNDNHYFGYSTPWGYFDFNRFHCHFSPRDWQRLINNNWGFRPKRLNFKLFNIQVKEVTTNDGVTTIANNLTSTVQVFSDSEYQLPYVLGSAHQGCLPPFPADVFMIPQYGYLTLNNGSQAVGRSSFYCLEYFPSQMLRTGNNFTFSYTFEDVPFHSSYAHSQSLDRLMNPLIDQYLYYLNRTQNQSGSAQNKDLLFSRGSPAGMSVQPKNWLPGPCYRQQRVSKTKTDNNNSNFTWTGASKYNLNGRESIINPGTAMASHKDDKDKFFPMSGVMIFGKESAGASNTALDNVMITDEEEIKATNPVATERFGTVAVNLQNSSTDPATGDVHVMGALPGMVWQDRDVYLQGPIWAKIPHTDGHFHPSPLMGGFGLKHPPPQILIKNTPVPANPPAEFSATKFASFITQYSTGQVSVEIEWELQKENSKRWNPEVQYTSNYAKSANVDFTVDNNGLYTEPRPIGTRYLTRPL

SEQ ID NO: 18 - DNA, 2208 bp, Artificial Sequence
  ITB102 214 (AAV214) VP1
atggctgccgatggttatcttccagattggctcgaggacaacctctctgagggcattcgcgagtggtgggcgctgaaacctggagccccgaagcccaaagccaaccagcaaaagcaggacgacggccggggtctggtgcttcctggctacaagtacctcggacccttcaacggactcgacaagggggagcccgtcaacgcggcggacgcagcggccctcgagcacgacaaggcctacgaccagcagctcaaagcgggtgacaatccgtacctgcggtataaccacgccgacgccgagtttcaggagcgtctgcaagaagatacgtcttttgggggcaacctcgggcgagcagtcttccaggccaagaagcgggttctcgaaccttttggtctggttgaggaaggtgctaagacggctcctggaaagaaacgtccggtagagcagtcgccacaagagccagactcctcctcgggcatcggcaagacaggccagcagcccgctaaaaagagactcaattttggtcagactggcgactcagagtcagtccccgacccacaacctctcggagaacctccagcaacccccgctgctgtgggacctactacaatggcttcaggcggtggcgcaccaatggcggacaataacgaaggcgccgacggagtgggtaatgcctcaggaaattggcattgcgattccacatggctgggcgacagagtcatcaccaccagcacccgcacctgggccttgcccacctacaataaccacctctacaagcaaatctccagtgcttcaacgggggccagcaacgacaaccactacttcggctacagcaccccctgggggtattttgacttcaacagattccactgccacttttcaccacgtgactggcaaagactcatcaacaacaactggggattccgacccaagagactcaacttcaagctctttaacattcaagtcaaagaggttacggacaacaatggagtcaagaccatcgccaataaccttaccagcacggtccaggtcttcacggactcagactatcagctcccgtacgtcctcggctctgcgcaccagggctgcctccctccgttcccggcggacgtgttcatgattccgcagtacggctacctaacgctcaacgacggcagccaggcagtgggacggtcatccttttactgcctggaatatttcccatcgcagatgctgagaacgggcaacaactttaccttcagctacacctttgaggacgttcctttccacagcagctacgctcacagccagagtctggaccgtctcatgaatcctctgattgaccagtacctgtactacttgtctaagactatcaacggatccggccagaatcagcagactctgaagttcagccaaggtgggcctaatacaatggccaatcaggcaaagaactggctgccaggaccctgttaccgccaacaacgcgtctcaacgacaaccgggcaaaacaacaatagcaactttgcctggactgctgggaccaaataccatctgaatggaagaaattcattgatgaatcctggccccgctatggcatcccacaaagagggcgaggaccgtttttttcccctgtccgggtccctgatttttggcaaacaaaatgctgccagagacaatgcggattacagcgatgtcatgctcaccagcgaggaagaaatcaaaaccactaaccctgtggctacagaggaatacggtatcgtggcagataacttgcagcagcaaaacacggctcctcaaattggaactgtcaacagccagggggccttacccggtatggtctggcagaaccgggacgtgtacctgcagggtcccatctgggccaagattcctcacacggacggcaacttccacccgtctccgctgatgggcggctttggcctgaaacatcctccgcctcagatcctgatcaagaacacgcctgtacctgcggatcctccgaccaccttcaaccagtcaaagctgaactctttcatcacgcaatacagcaccggacaggtcagcgtggaaattgaatgggagctgcagaaggaaaacagcaagcgctggaaccccgagatccagtacacctccaactactacaaatctacaagtgtggactttgctgttaatacagaaggcgtgtactctgaaccccaccccattggcacccgttacctcacccgtcccctgtaa

SEQ ID NO: 19 - DNA, 2211 bp, Artificial Sequence
  AAV214-A VP1
atggctgccgatggttatcttccagattggctcgaggacaacctctctgagggcattcgcgagtggtgggcgctgaaacctggagccccgaagcccaaagccaaccagcaaaagcaggacgacggccggggtctggtgcttcctggctacaagtacctcggacccttcaacggactcgacaagggggagcccgtcaacgcggcggacgcagcggccctcgagcacgacaaggcctacgaccagcagctcaaagcgggtgacaatccgtacctgcggtataaccacgccgacgccgagtttcaggagcgtctgcaagaagatacgtcttttgggggcaacctcgggcgagcagtcttccaggccaagaagcgggttctcgaaccttttggtctggttgaggaaggtgctaagacggctcctggaaagaaacgtccggtagagcagtcgccacaagagccagactcctcctcgggcatcggcaagacaggccagcagcccgctaaaaagagactcaattttggtcagactggcgactcagagtcagtccccgacccacaacctctcggagaacctccagcaacccccgctgctgtgggacctactacaatggcttcaggcggtggcgcaccaatggcggacaataacgaaggcgccgacggagtgggtaatgcctcaggaaattggcattgcgattccacatggctgggcgacagagtcatcaccaccagcacccgcacctgggccttgcccacctacaataaccacctctacaagcaaatctccaacagcacatctggaggatcttcaaatgacaacgcctacttcggctacagcaccccctgggggtattttgacttcaacagattccactgccacttttcaccacgtgactggcaaagactcatcaacaacaactggggattccgacccaagagactcaacttcaagctctttaacattcaagtcaaagaggttacggacaacaatggagtcaagaccatcgccaataaccttaccagcacggtccaggtcttcacggactcagactatcagctcccgtacgtcctcggctctgcgcaccagggctgcctccctccgttcccggcggacgtgttcatgattccgcagtacggctacctaacgctcaacgacggcagccaggcagtgggacggtcatccttttactgcctggaatatttcccatcgcagatgctgagaacgggcaacaactttaccttcagctacacctttgaggacgttcctttccacagcagctacgctcacagccagagtctggaccgtctcatgaatcctctgattgaccagtacctgtactacttgtctaagactatcaacggatccggccagaatcagcagactctgaagttcagccaaggtgggcctaatacaatggccaatcaggcaaagaactggctgccaggaccctgttaccgccaacaacgcgtctcaacgacaaccgggcaaaacaacaatagcaactttgcctggactgctgggaccaaataccatctgaatggaagaaattcattgatgaatcctggccccgctatggcatcccacaaagagggcgaggaccgtttttttcccctgtccgggtccctgatttttggcaaacaaaatgctgccagagacaatgcggattacagcgatgtcatgctcaccagcgaggaagaaatcaaaaccactaaccctgtggctacagaggaatacggtatcgtggcagataacttgcagcagcaaaacacggctcctcaaattggaactgtcaacagccagggggccttacccggtatggtctggcagaaccgggacgtgtacctgcagggtcccatctgggccaagattcctcacacggacggcaacttccacccgtctccgctgatgggcggctttggcctgaaacatcctccgcctcagatcctgatcaagaacacgcctgtacctgcggatcctccgaccaccttcaaccagtcaaagctgaactctttcatcacgcaatacagcaccggacaggtcagcgtggaaattgaatgggagctgcagaaggaaaacagcaagcgctggaaccccgagatccagtacacctccaactactacaaatctacaagtgtggactttgctgttaatacagaaggcgtgtactctgaaccccaccccattggcacccgttacctcacccgtcccctgtaa

SEQ ID NO: 20 - DNA, 2211 bp, Artificial Sequence
  AAV214e VP1
atggctgccgatggttatcttccagattggctcgaggacaacctctctgagggcattcgcgagtggtgggacttgaaacctggagccccgaaacccaaagccaaccagcaaaagcaggacgacggccggggtctggtgcttcctggctacaagtacctcggacccttcaacggactcgacaagggggagcccgtcaacgcggcggatgcagcggccctcgagcacgacaaggcctacgaccagcagctcaaagcgggtgacaatccgtacctgcggtataaccacgccgacgccgagtttcaggagcgtctgcaagaagatacgtcttttgggggcaacctcgggcgagcagtcttccaggccaagaagcgggttctcgaacctctcggtctggttgaggaaggcgctaagacggctcctggaaagaagagaccggtagagccatcaccccagcgttctccagactcctctacgggcatcggcaagaaaggccaacagcccgccagaaaaagactcaattttggtcagactggcgactcagagtcagtccccgacccacaacctctcggagaacctccagcaacccccgctgctgtgggacctactacaatggcttcaggcggtggcgcaccaatggcagacaataacgaaggcgccgacggagtgggtaatgcctcaggaaattggcattgcgattccacatggctgggcgacagagtcatcaccaccagcacccgcacctgggccttgcccacctacaataaccacctctacaagcaaatctccagtgcttcaacgggggccagcaacgacaaccactacttcggctacagcaccccctgggggtattttgacttcaacagattccactgccacttttcaccacgtgactggcaaagactcatcaacaacaactggggattccgacccaagagactcaacttcaagctctttaacattcaagtcaaagaggttacggacaacaatggagtcaagaccatcgccaataaccttaccagcacggtccaggtcttcacggactcagactatcagctcccgtacgtcctcggctctgcgcaccagggctgcctccctccgttcccggcggacgtgttcatgattccgcagtacggctacctaacgctcaacgacggcagccaggcagtgggacggtcatccttttactgcctggaatatttcccatcgcagatgctgagaacgggcaacaactttaccttcagctacacctttgaggacgttcctttccacagcagctacgctcacagccagagtctggaccgtctcatgaatcctctgattgaccagtacctgtactacttgtctaagactatcaacggatccggccagaatcagcagactctgaagttcagccaaggtgggcctaatacaatggccaatcaggcaaagaactggctgccaggaccctgttaccgccaacaacgcgtctcaacgacaaccgggcaaaacaacaatagcaactttgcctggactgctgggaccaaataccatctgaatggaagaaattcattgatgaatcctggccccgctatggcatcccacaaagagggcgaggaccgtttttttcccctgtccgggtccctgatttttggcaaacaaaatgctgccagagacaatgcggattacagcgatgtcatgctcaccagcgaggaagaaatcaaaaccactaaccctgtggctacagaggaatacggtatcgtggcagataacttgcagcagcaaaacacggctcctcaaattggaactgtcaacagccagggggccttacccggtatggtctggcagaaccgggacgtgtacctgcagggtcccatctgggccaagattcctcacacggacggcaacttccacccgtctccgctgatgggcggctttggcctgaaacatcctccgcctcagatcctgatcaagaacacgcctgtacctgcggatcctccgaccaccttcaaccagtcaaagctgaactctttcatcacgcaatacagcaccggacaggtcagcgtggaaattgaatgggagctgcagaaggaaaacagcaagcgctggaaccccgagatccagtacacctccaactactacaaatctacaagtgtggactttgctgttaatacagaaggcgtgtactctgaaccccaccccattggcacccgttacctcacccgtcccctgtaa

SEQ ID NO: 21 - DNA, 2211 bp, Artificial Sequence
  AAV214e8 VP1
atggctgccgatggttatcttccagattggctcgaggacaacctctctgagggcattcgcgagtggtgggcgctgaaacctggagccccgaagcccaaagccaaccagcaaaagcaggacgacggccggggtctggtgcttcctggctacaagtacctcggacccttcaacggactcgacaagggggagcccgtcaacgcggcggacgcagcggccctcgagcacgacaaggcctacgaccagcagctgcaggcgggtgacaatccgtacctgcggtataaccacgccgacgccgagtttcaggagcgtctgcaagaagatacgtcttttgggggcaacctcgggcgagcagtcttccaggccaagaagcgggttctcgaacctctcggtctggttgaggaaggcgctaagacggctcctggaaagaagagaccggtagagccatcaccccagcgttctccagactcctctacgggcatcggcaagaaaggccaacagcccgccagaaaaagactcaattttggtcagactggcgactcagagtcagttccagaccctcaacctctcggagaacctccagcagcgccctctggtgtgggacctaatacaatggcttcaggcggtggcgcaccaatggcggacaataacgaaggcgccgacggagtgggtaatgcctcaggaaattggcattgcgattccacatggctgggcgacagagtcatcaccaccagcacccgcacctgggccttgcccacctacaataaccacctctacaagcaaatctccagtgcttcaacgggggccagcaacgacaaccactacttcggctacagcaccccctgggggtattttgacttcaacagattccactgccacttttcaccacgtgactggcaaagactcatcaacaacaactggggattccgacccaagagactcaacttcaagctctttaacattcaagtcaaagaggttacggacaacaatggagtcaagaccatcgccaataaccttaccagcacggtccaggtcttcacggactcagactatcagctcccgtacgtcctcggctctgcgcaccagggctgcctccctccgttcccggcggacgtgttcatgattccgcagtacggctacctaacgctcaacgacggcagccaggcagtgggacggtcatccttttactgcctggaatatttcccatcgcagatgctgagaacgggcaacaactttaccttcagctacacctttgaggacgttcctttccacagcagctacgctcacagccagagtctggaccgtctcatgaatcctctgattgaccagtacctgtactacttgtctaagactatcaacggatccggccagaatcagcagactctgaagttcagccaaggtgggcctaatacaatggccaatcaggcaaagaactggctgccaggaccctgttaccgccaacaacgcgtctcaacgacaaccgggcaaaacaacaatagcaactttgcctggactgctgggaccaaataccatctgaatggaagaaattcattgatgaatcctggccccgctatggcatcccacaaagagggcgaggaccgtttttttcccctgtccgggtccctgatttttggcaaacaaaatgctgccagagacaatgcggattacagcgatgtcatgctcaccagcgaggaagaaatcaaaaccactaaccctgtggctacagaggaatacggtatcgtggcagataacttgcagcagcaaaacacggctcctcaaattggaactgtcaacagccagggggccttacccggtatggtctggcagaaccgggacgtgtacctgcagggtcccatctgggccaagattcctcacacggacggcaacttccacccgtctccgctgatgggcggctttggcctgaaacatcctccgcctcagatcctgatcaagaacacgcctgtacctgcggatcctccgaccaccttcaaccagtcaaagctgaactctttcatcacgcaatacagcaccggacaggtcagcgtggaaattgaatgggagctgcagaaggaaaacagcaagcgctggaaccccgagatccagtacacctccaactactacaaatctacaagtgtggactttgctgttaatacagaaggcgtgtactctgaaccccaccccattggcacccgttacctcacccgtcccctgtaa

SEQ ID NO: 22 - DNA, 2208 bp, Artificial Sequence
  AAV214e9 VP1
atggctgccgatggttatcttccagattggctcgaggacaaccttagtgaaggaattcgcgagtggtgggctttgaaacctggagcccctcaacccaaggcaaatcaacaacatcaagacaacgctcgaggtcttgtgcttccgggttacaaataccttggacccggcaacggactcgacaagggggagccggtcaacgcagcagacgcggcggccctcgagcacgacaaggcctacgaccagcagctcaaggccggagacaacccgtacctcaagtacaaccacgccgacgccgagttccaggagcggctcaaagaagatacgtcttttgggggcaacctcgggcgagcagtcttccaggccaaaaagaggcttcttgaacctcttggtctggttgaggaagcggctaagacggctcctggaaagaagaggcctgtagagcagtctccccaggaaccggactcctccgcgggtattggcaaatcgggtgcacagcccgctaaaaagagactcaatttcggtcagactggcgacacagagtcagtcccagaccctcaaccaatcggagaacctcccgcagccccctctggtgtgggatctcttacaatggcttcaggcggtggcgcaccaatggcggacaataacgaaggcgccgacggagtgggtaatgcctcaggaaattggcattgcgattccacatggctgggcgacagagtcatcaccaccagcacccgcacctgggccttgcccacctacaataaccacctctacaagcaaatctccagtgcttcaacgggggccagcaacgacaaccactacttcggctacagcaccccctgggggtattttgacttcaacagattccactgccacttttcaccacgtgactggcaaagactcatcaacaacaactggggattccgacccaagagactcaacttcaagctctttaacattcaagtcaaagaggttacggacaacaatggagtcaagaccatcgccaataaccttaccagcacggtccaggtcttcacggactcagactatcagctcccgtacgtcctcggctctgcgcaccagggctgcctccctccgttcccggcggacgtgttcatgattccgcagtacggctacctaacgctcaacgacggcagccaggcagtgggacggtcatccttttactgcctggaatatttcccatcgcagatgctgagaacgggcaacaactttaccttcagctacacctttgaggacgttcctttccacagcagctacgctcacagccagagtctggaccgtctcatgaatcctctgattgaccagtacctgtactacttgtctaagactatcaacggatccggccagaatcagcagactctgaagttcagccaaggtgggcctaatacaatggccaatcaggcaaagaactggctgccaggaccctgttaccgccaacaacgcgtctcaacgacaaccgggcaaaacaacaatagcaactttgcctggactgctgggaccaaataccatctgaatggaagaaattcattgatgaatcctggccccgctatggcatcccacaaagagggcgaggaccgtttttttcccctgtccgggtccctgatttttggcaaacaaaatgctgccagagacaatgcggattacagcgatgtcatgctcaccagcgaggaagaaatcaaaaccactaaccctgtggctacagaggaatacggtatcgtggcagataacttgcagcagcaaaacacggctcctcaaattggaactgtcaacagccagggggccttacccggtatggtctggcagaaccgggacgtgtacctgcagggtcccatctgggccaagattcctcacacggacggcaacttccacccgtctccgctgatgggcggctttggcctgaaacatcctccgcctcagatcctgatcaagaacacgcctgtacctgcggatcctccgaccaccttcaaccagtcaaagctgaactctttcatcacgcaatacagcaccggacaggtcagcgtggaaattgaatgggagctgcagaaggaaaacagcaagcgctggaaccccgagatccagtacacctccaactactacaaatctacaagtgtggactttgctgttaatacagaaggcgtgtactctgaaccccaccccattggcacccgttacctcacccgtcccctgtaa

SEQ ID NO: 23 - DNA, 2211 bp, Artificial Sequence
  AAV214e10 VP1
atggctgccgatggttatcttccagattggctcgaggacaacctctctgagggcattcgcgagtggtgggacttgaaacctggagccccgaaacccaaagccaaccagcaaaagcaggacgacggccggggtctggtgcttcctggctacaagtacctcggacccttcaacggactcgacaagggggagcccgtcaacgcggcggacgcagcggccctcgagcacgacaaggcctacgaccagcagctcaaagcgggtgacaatccgtacctgcggtataaccacgccgacgccgagtttcaggagcgtctgcaagaagatacgtcttttgggggcaacctcgggcgagcagtcttccaggccaagaagcgggttctcgaacctctcggtctggttgaggaaggcgctaagacggctcctggaaagaagagaccggtagagccatcaccccagcgttctccagactcctctacgggcatcggcaagaaaggccagcagcccgcgaaaaagagactcaactttgggcagactggcgactcagagtcagtgcccgaccctcaaccaatcggagaaccccccgcaggcccctctggtctgggatctggtacaatggcttcaggcggtggcgcaccaatggcggacaataacgaaggcgccgacggagtgggtaatgcctcaggaaattggcattgcgattccacatggctgggcgacagagtcatcaccaccagcacccgcacctgggccttgcccacctacaataaccacctctacaagcaaatctccagtgcttcaacgggggccagcaacgacaaccactacttcggctacagcaccccctgggggtattttgacttcaacagattccactgccacttttcaccacgtgactggcaaagactcatcaacaacaactggggattccgacccaagagactcaacttcaagctctttaacattcaagtcaaagaggttacggacaacaatggagtcaagaccatcgccaataaccttaccagcacggtccaggtcttcacggactcagactatcagctcccgtacgtcctcggctctgcgcaccagggctgcctccctccgttcccggcggacgtgttcatgattccgcagtacggctacctaacgctcaacgacggcagccaggcagtgggacggtcatccttttactgcctggaatatttcccatcgcagatgctgagaacgggcaacaactttaccttcagctacacctttgaggacgttcctttccacagcagctacgctcacagccagagtctggaccgtctcatgaatcctctgattgaccagtacctgtactacttgtctaagactatcaacggatccggccagaatcagcagactctgaagttcagccaaggtgggcctaatacaatggccaatcaggcaaagaactggctgccaggaccctgttaccgccaacaacgcgtctcaacgacaaccgggcaaaacaacaatagcaactttgcctggactgctgggaccaaataccatctgaatggaagaaattcattgatgaatcctggccccgctatggcatcccacaaagagggcgaggaccgtttttttcccctgtccgggtccctgatttttggcaaacaaaatgctgccagagacaatgcggattacagcgatgtcatgctcaccagcgaggaagaaatcaaaaccactaaccctgtggctacagaggaatacggtatcgtggcagataacttgcagcagcaaaacacggctcctcaaattggaactgtcaacagccagggggccttacccggtatggtctggcagaaccgggacgtgtacctgcagggtcccatctgggccaagattcctcacacggacggcaacttccacccgtctccgctgatgggcggctttggcctgaaacatcctccgcctcagatcctgatcaagaacacgcctgtacctgcggatcctccgaccaccttcaaccagtcaaagctgaactctttcatcacgcaatacagcaccggacaggtcagcgtggaaattgaatgggagctgcagaaggaaaacagcaagcgctggaaccccgagatccagtacacctccaactactacaaatctacaagtgtggactttgctgttaatacagaaggcgtgtactctgaaccccaccccattggcacccgttacctcacccgtcccctgtaa

SEQ ID NO: 24 - DNA, 1602 bp, Artificial Sequence
  ITB102 214 (AAV214) VP3
atggcttcaggcggtggcgcaccaatggcggacaataacgaaggcgccgacggagtgggtaatgcctcaggaaattggcattgcgattccacatggctgggcgacagagtcatcaccaccagcacccgcacctgggccttgcccacctacaataaccacctctacaagcaaatctccagtgcttcaacgggggccagcaacgacaaccactacttcggctacagcaccccctgggggtattttgacttcaacagattccactgccacttttcaccacgtgactggcaaagactcatcaacaacaactggggattccgacccaagagactcaacttcaagctctttaacattcaagtcaaagaggttacggacaacaatggagtcaagaccatcgccaataaccttaccagcacggtccaggtcttcacggactcagactatcagctcccgtacgtcctcggctctgcgcaccagggctgcctccctccgttcccggcggacgtgttcatgattccgcagtacggctacctaacgctcaacgacggcagccaggcagtgggacggtcatccttttactgcctggaatatttcccatcgcagatgctgagaacgggcaacaactttaccttcagctacacctttgaggacgttcctttccacagcagctacgctcacagccagagtctggaccgtctcatgaatcctctgattgaccagtacctgtactacttgtctaagactatcaacggatccggccagaatcagcagactctgaagttcagccaaggtgggcctaatacaatggccaatcaggcaaagaactggctgccaggaccctgttaccgccaacaacgcgtctcaacgacaaccgggcaaaacaacaatagcaactttgcctggactgctgggaccaaataccatctgaatggaagaaattcattgatgaatcctggccccgctatggcatcccacaaagagggcgaggaccgtttttttcccctgtccgggtccctgatttttggcaaacaaaatgctgccagagacaatgcggattacagcgatgtcatgctcaccagcgaggaagaaatcaaaaccactaaccctgtggctacagaggaatacggtatcgtggcagataacttgcagcagcaaaacacggctcctcaaattggaactgtcaacagccagggggccttacccggtatggtctggcagaaccgggacgtgtacctgcagggtcccatctgggccaagattcctcacacggacggcaacttccacccgtctccgctgatgggcggctttggcctgaaacatcctccgcctcagatcctgatcaagaacacgcctgtacctgcggatcctccgaccaccttcaaccagtcaaagctgaactctttcatcacgcaatacagcaccggacaggtcagcgtggaaattgaatgggagctgcagaaggaaaacagcaagcgctggaaccccgagatccagtacacctccaactactacaaatctacaagtgtggactttgctgttaatacagaaggcgtgtactctgaaccccaccccattggcacccgttacctcacccgtcccctgtaa

SEQ ID NO: 25 - DNA, 1605 bp, Artificial Sequence
  AAV214-A VP3
atggcttcaggcggtggcgcaccaatggcggacaataacgaaggcgccgacggagtgggtaatgcctcaggaaattggcattgcgattccacatggctgggcgacagagtcatcaccaccagcacccgcacctgggccttgcccacctacaataaccacctctacaagcaaatctccaacagcacatctggaggatcttcaaatgacaacgcctacttcggctacagcaccccctgggggtattttgacttcaacagattccactgccacttttcaccacgtgactggcaaagactcatcaacaacaactggggattccgacccaagagactcaacttcaagctctttaacattcaagtcaaagaggttacggacaacaatggagtcaagaccatcgccaataaccttaccagcacggtccaggtcttcacggactcagactatcagctcccgtacgtcctcggctctgcgcaccagggctgcctccctccgttcccggcggacgtgttcatgattccgcagtacggctacctaacgctcaacgacggcagccaggcagtgggacggtcatccttttactgcctggaatatttcccatcgcagatgctgagaacgggcaacaactttaccttcagctacacctttgaggacgttcctttccacagcagctacgctcacagccagagtctggaccgtctcatgaatcctctgattgaccagtacctgtactacttgtctaagactatcaacggatccggccagaatcagcagactctgaagttcagccaaggtgggcctaatacaatggccaatcaggcaaagaactggctgccaggaccctgttaccgccaacaacgcgtctcaacgacaaccgggcaaaacaacaatagcaactttgcctggactgctgggaccaaataccatctgaatggaagaaattcattgatgaatcctggccccgctatggcatcccacaaagagggcgaggaccgtttttttcccctgtccgggtccctgatttttggcaaacaaaatgctgccagagacaatgcggattacagcgatgtcatgctcaccagcgaggaagaaatcaaaaccactaaccctgtggctacagaggaatacggtatcgtggcagataacttgcagcagcaaaacacggctcctcaaattggaactgtcaacagccagggggccttacccggtatggtctggcagaaccgggacgtgtacctgcagggtcccatctgggccaagattcctcacacggacggcaacttccacccgtctccgctgatgggcggctttggcctgaaacatcctccgcctcagatcctgatcaagaacacgcctgtacctgcggatcctccgaccaccttcaaccagtcaaagctgaactctttcatcacgcaatacagcaccggacaggtcagcgtggaaattgaatgggagctgcagaaggaaaacagcaagcgctggaaccccgagatccagtacacctccaactactacaaatctacaagtgtggactttgctgttaatacagaaggcgtgtactctgaaccccaccccattggcacccgttacctcacccgtcccctgtaa

SEQ ID NO: 26 - DNA, 1602 bp, Artificial Sequence
  AAV214e VP3
atggcttcaggcggtggcgcaccaatggcagacaataacgaaggcgccgacggagtgggtaatgcctcaggaaattggcattgcgattccacatggctgggcgacagagtcatcaccaccagcacccgcacctgggccttgcccacctacaataaccacctctacaagcaaatctccagtgcttcaacgggggccagcaacgacaaccactacttcggctacagcaccccctgggggtattttgacttcaacagattccactgccacttttcaccacgtgactggcaaagactcatcaacaacaactggggattccgacccaagagactcaacttcaagctctttaacattcaagtcaaagaggttacggacaacaatggagtcaagaccatcgccaataaccttaccagcacggtccaggtcttcacggactcagactatcagctcccgtacgtcctcggctctgcgcaccagggctgcctccctccgttcccggcggacgtgttcatgattccgcagtacggctacctaacgctcaacgacggcagccaggcagtgggacggtcatccttttactgcctggaatatttcccatcgcagatgctgagaacgggcaacaactttaccttcagctacacctttgaggacgttcctttccacagcagctacgctcacagccagagtctggaccgtctcatgaatcctctgattgaccagtacctgtactacttgtctaagactatcaacggatccggccagaatcagcagactctgaagttcagccaaggtgggcctaatacaatggccaatcaggcaaagaactggctgccaggaccctgttaccgccaacaacgcgtctcaacgacaaccgggcaaaacaacaatagcaactttgcctggactgctgggaccaaataccatctgaatggaagaaattcattgatgaatcctggccccgctatggcatcccacaaagagggcgaggaccgtttttttcccctgtccgggtccctgatttttggcaaacaaaatgctgccagagacaatgcggattacagcgatgtcatgctcaccagcgaggaagaaatcaaaaccactaaccctgtggctacagaggaatacggtatcgtggcagataacttgcagcagcaaaacacggctcctcaaattggaactgtcaacagccagggggccttacccggtatggtctggcagaaccgggacgtgtacctgcagggtcccatctgggccaagattcctcacacggacggcaacttccacccgtctccgctgatgggcggctttggcctgaaacatcctccgcctcagatcctgatcaagaacacgcctgtacctgcggatcctccgaccaccttcaaccagtcaaagctgaactctttcatcacgcaatacagcaccggacaggtcagcgtggaaattgaatgggagctgcagaaggaaaacagcaagcgctggaaccccgagatccagtacacctccaactactacaaatctacaagtgtggactttgctgttaatacagaaggcgtgtactctgaaccccaccccattggcacccgttacctcacccgtcccctgtaa

SEQ ID NO: 27 - DNA, 1602 bp, Artificial Sequence; identical to SEQ ID NO: 24
  AAV214e8 VP3

SEQ ID NO: 28 - DNA, 1602 bp, Artificial Sequence; identical to SEQ ID NO: 24
  AAV214e9 VP3

SEQ ID NO: 29 - DNA, 1602 bp, Artificial Sequence; identical to SEQ ID NO: 24
  AAV214e10 VP3

SEQ ID NO: 30 - protein, 736 aa, Artificial Sequence
  AAV214A VP1
MAADGYLPDWLEDNLSEGIREWWALKPGAPKPKANQQKQDDGRGLVLPGYKYLGPFNGLDKGEPVNAADAAALEHDKAYDQQLKAGDNPYLRYNHADAEFQERLQEDTSFGGNLGRAVFQAKKRVLEPFGLVEEGAKTAPGKKRPVEQSPQEPDSSSGIGKTGQQPAKKRLNFGQTGDSESVPDPQPLGEPPATPAAVGPTTMASGGGAPMADNNEGADGVGNASGNWHCDSTWLGDRVITTSTRTWALPTYNNHLYKQISNSTSGGSSNDNAYFGYSTPWGYFDFNRFHCHFSPRDWQRLINNNWGFRPKRLNFKLFNIQVKEVTDNNGVKTIANNLTSTVQVFTDSDYQLPYVLGSAHQGCLPPFPADVFMIPQYGYLTLNDGSQAVGRSSFYCLEYFPSQMLRTGNNFTFSYTFEDVPFHSSYAHSQSLDRLMNPLIDQYLYYLSKTINGSGQNQQTLKFSQGGPNTMANQAKNWLPGPCYRQQRVSTTTGQNNNSNFAWTAGTKYHLNGRNSLMNPGPAMASHKEGEDRFFPLSGSLIFGKQNAARDNADYSDVMLTSEEEIKTTNPVATEEYGIVADNLQQQNTAPQIGTVNSQGALPGMVWQNRDVYLQGPIWAKIPHTDGNFHPSPLMGGFGLKHPPPQILIKNTPVPADPPTTFNQSKLNSFITQYSTGQVSVEIEWELQKENSKRWNPEIQYTSNYYKSTSVDFAVNTEGVYSEPHPIGTRYLTRPL

SEQ ID NO: 31 - protein, 736 aa, Artificial Sequence
  AAV214e VP1
MAADGYLPDWLEDNLSEGIREWWDLKPGAPKPKANQQKQDDGRGLVLPGYKYLGPFNGLDKGEPVNAADAAALEHDKAYDQQLKAGDNPYLRYNHADAEFQERLQEDTSFGGNLGRAVFQAKKRVLEPLGLVEEGAKTAPGKKRPVEPSPQRSPDSSTGIGKKGQQPARKRLNFGQTGDSESVPDPQPLGEPPATPAAVGPTTMASGGGAPMADNNEGADGVGNASGNWHCDSTWLGDRVITTSTRTWALPTYNNHLYKQISSASTGASNDNHYFGYSTPWGYFDFNRFHCHFSPRDWQRLINNNWGFRPKRLNFKLFNIQVKEVTDNNGVKTIANNLTSTVQVFTDSDYQLPYVLGSAHQGCLPPFPADVFMIPQYGYLTLNDGSQAVGRSSFYCLEYFPSQMLRTGNNFTFSYTFEDVPFHSSYAHSQSLDRLMNPLIDQYLYYLSKTINGSGQNQQTLKFSQGGPNTMANQAKNWLPGPCYRQQRVSTTTGQNNNSNFAWTAGTKYHLNGRNSLMNPGPAMASHKEGEDRFFPLSGSLIFGKQNAARDNADYSDVMLTSEEEIKTTNPVATEEYGIVADNLQQQNTAPQIGTVNSQGALPGMVWQNRDVYLQGPIWAKIPHTDGNFHPSPLMGGFGLKHPPPQILIKNTPVPADPPTTFNQSKLNSFITQYSTGQVSVEIEWELQKENSKRWNPEIQYTSNYYKSTSVDFAVNTEGVYSEPHPIGTRYLTRPL

SEQ ID NO: 32 - protein, 736 aa, Artificial Sequence
  AAV214e8 VP1
MAADGYLPDWLEDNLSEGIREWWALKPGAPKPKANQQKQDDGRGLVLPGYKYLGPFNGLDKGEPVNAADAAALEHDKAYDQQLQAGDNPYLRYNHADAEFQERLQEDTSFGGNLGRAVFQAKKRVLEPLGLVEEGAKTAPGKKRPVEPSPQRSPDSSTGIGKKGQQPARKRLNFGQTGDSESVPDPQPLGEPPAAPSGVGPNTMASGGGAPMADNNEGADGVGNASGNWHCDSTWLGDRVITTSTRTWALPTYNNHLYKQISSASTGASNDNHYFGYSTPWGYFDFNRFHCHFSPRDWQRLINNNWGFRPKRLNFKLFNIQVKEVTDNNGVKTIANNLTSTVQVFTDSDYQLPYVLGSAHQGCLPPFPADVFMIPQYGYLTLNDGSQAVGRSSFYCLEYFPSQMLRTGNNFTFSYTFEDVPFHSSYAHSQSLDRLMNPLIDQYLYYLSKTINGSGQNQQTLKFSQGGPNTMANQAKNWLPGPCYRQQRVSTTTGQNNNSNFAWTAGTKYHLNGRNSLMNPGPAMASHKEGEDRFFPLSGSLIFGKQNAARDNADYSDVMLTSEEEIKTTNPVATEEYGIVADNLQQQNTAPQIGTVNSQGALPGMVWQNRDVYLQGPIWAKIPHTDGNFHPSPLMGGFGLKHPPPQILIKNTPVPADPPTTFNQSKLNSFITQYSTGQVSVEIEWELQKENSKRWNPEIQYTSNYYKSTSVDFAVNTEGVYSEPHPIGTRYLTRPL

SEQ ID NO: 33 - protein, 735 aa, Artificial Sequence
  AAV214e9 VP1
MAADGYLPDWLEDNLSEGIREWWALKPGAPQPKANQQHQDNARGLVLPGYKYLGPGNGLDKGEPVNAADAAALEHDKAYDQQLKAGDNPYLKYNHADAEFQERLKEDTSFGGNLGRAVFQAKKRLLEPLGLVEEAAKTAPGKKRPVEQSPQEPDSSAGIGKSGAQPAKKRLNFGQTGDTESVPDPQPIGEPPAAPSGVGSLTMASGGGAPMADNNEGADGVGNASGNWHCDSTWLGDRVITTSTRTWALPTYNNHLYKQISSASTGASNDNHYFGYSTPWGYFDFNRFHCHFSPRDWQRLINNNWGFRPKRLNFKLFNIQVKEVTDNNGVKTIANNLTSTVQVFTDSDYQLPYVLGSAHQGCLPPFPADVFMIPQYGYLTLNDGSQAVGRSSFYCLEYFPSQMLRTGNNFTFSYTFEDVPFHSSYAHSQSLDRLMNPLIDQYLYYLSKTINGSGQNQQTLKFSQGGPNTMANQAKNWLPGPCYRQQRVSTTTGQNNNSNFAWTAGTKYHLNGRNSLMNPGPAMASHKEGEDRFFPLSGSLIFGKQNAARDNADYSDVMLTSEEEIKTTNPVATEEYGIVADNLQQQNTAPQIGTVNSQGALPGMVWQNRDVYLQGPIWAKIPHTDGNFHPSPLMGGFGLKHPPPQILIKNTPVPADPPTTFNQSKLNSFITQYSTGQVSVEIEWELQKENSKRWNPEIQYTSNYYKSTSVDFAVNTEGVYSEPHPIGTRYLTRPL

SEQ ID NO: 34 - protein, 736 aa, Artificial Sequence
  AAV214e10 VP1
MAADGYLPDWLEDNLSEGIREWWDLKPGAPKPKANQQKQDDGRGLVLPGYKYLGPFNGLDKGEPVNAADAAALEHDKAYDQQLKAGDNPYLRYNHADAEFQERLQEDTSFGGNLGRAVFQAKKRVLEPLGLVEEGAKTAPGKKRPVEPSPQRSPDSSTGIGKKGQQPAKKRLNFGQTGDSESVPDPQPIGEPPAGPSGLGSGTMASGGGAPMADNNEGADGVGNASGNWHCDSTWLGDRVITTSTRTWALPTYNNHLYKQISSASTGASNDNHYFGYSTPWGYFDFNRFHCHFSPRDWQRLINNNWGFRPKRLNFKLFNIQVKEVTDNNGVKTIANNLTSTVQVFTDSDYQLPYVLGSAHQGCLPPFPADVFMIPQYGYLTLNDGSQAVGRSSFYCLEYFPSQMLRTGNNFTFSYTFEDVPFHSSYAHSQSLDRLMNPLIDQYLYYLSKTINGSGQNQQTLKFSQGGPNTMANQAKNWLPGPCYRQQRVSTTTGQNNNSNFAWTAGTKYHLNGRNSLMNPGPAMASHKEGEDRFFPLSGSLIFGKQNAARDNADYSDVMLTSEEEIKTTNPVATEEYGIVADNLQQQNTAPQIGTVNSQGALPGMVWQNRDVYLQGPIWAKIPHTDGNFHPSPLMGGFGLKHPPPQILIKNTPVPADPPTTFNQSKLNSFITQYSTGQVSVEIEWELQKENSKRWNPEIQYTSNYYKSTSVDFAVNTEGVYSEPHPIGTRYLTRPL

SEQ ID NO: 35 - protein, 598 aa, Artificial Sequence
  AAV214 VP2
MAPGKKRPVEQSPQEPDSSSGIGKTGQQPAKKRLNFGQTGDSESVPDPQPLGEPPATPAAVGPTTMASGGGAPMADNNEGADGVGNASGNWHCDSTWLGDRVITTSTRTWALPTYNNHLYKQISSASTGASNDNHYFGYSTPWGYFDFNRFHCHFSPRDWQRLINNNWGFRPKRLNFKLFNIQVKEVTDNNGVKTIANNLTSTVQVFTDSDYQLPYVLGSAHQGCLPPFPADVFMIPQYGYLTLNDGSQAVGRSSFYCLEYFPSQMLRTGNNFTFSYTFEDVPFHSSYAHSQSLDRLMNPLIDQYLYYLSKTINGSGQNQQTLKFSQGGPNTMANQAKNWLPGPCYRQQRVSTTTGQNNNSNFAWTAGTKYHLNGRNSLMNPGPAMASHKEGEDRFFPLSGSLIFGKQNAARDNADYSDVMLTSEEEIKTTNPVATEEYGIVADNLQQQNTAPQIGTVNSQGALPGMVWQNRDVYLQGPIWAKIPHTDGNFHPSPLMGGFGLKHPPPQILIKNTPVPADPPTTFNQSKLNSFITQYSTGQVSVEIEWELQKENSKRWNPEIQYTSNYYKSTSVDFAVNTEGVYSEPHPIGTRYLTRPL

SEQ ID NO: 36 - protein, 599 aa, Artificial Sequence
  AAV214A VP2
MAPGKKRPVEQSPQEPDSSSGIGKTGQQPAKKRLNFGQTGDSESVPDPQPLGEPPATPAAVGPTTMASGGGAPMADNNEGADGVGNASGNWHCDSTWLGDRVITTSTRTWALPTYNNHLYKQISNSTSGGSSNDNAYFGYSTPWGYFDFNRFHCHFSPRDWQRLINNNWGFRPKRLNFKLFNIQVKEVTDNNGVKTIANNLTSTVQVFTDSDYQLPYVLGSAHQGCLPPFPADVFMIPQYGYLTLNDGSQAVGRSSFYCLEYFPSQMLRTGNNFTFSYTFEDVPFHSSYAHSQSLDRLMNPLIDQYLYYLSKTINGSGQNQQTLKFSQGGPNTMANQAKNWLPGPCYRQQRVSTTTGQNNNSNFAWTAGTKYHLNGRNSLMNPGPAMASHKEGEDRFFPLSGSLIFGKQNAARDNADYSDVMLTSEEEIKTTNPVATEEYGIVADNLQQQNTAPQIGTVNSQGALPGMVWQNRDVYLQGPIWAKIPHTDGNFHPSPLMGGFGLKHPPPQILIKNTPVPADPPTTFNQSKLNSFITQYSTGQVSVEIEWELQKENSKRWNPEIQYTSNYYKSTSVDFAVNTEGVYSEPHPIGTRYLTRPL

SEQ ID NO: 37 - protein, 599 aa, Artificial Sequence
  AAV214e VP2
MAPGKKRPVEPSPQRSPDSSTGIGKKGQQPARKRLNFGQTGDSESVPDPQPLGEPPATPAAVGPTTMASGGGAPMADNNEGADGVGNASGNWHCDSTWLGDRVITTSTRTWALPTYNNHLYKQISSASTGASNDNHYFGYSTPWGYFDFNRFHCHFSPRDWQRLINNNWGFRPKRLNFKLFNIQVKEVTDNNGVKTIANNLTSTVQVFTDSDYQLPYVLGSAHQGCLPPFPADVFMIPQYGYLTLNDGSQAVGRSSFYCLEYFPSQMLRTGNNFTFSYTFEDVPFHSSYAHSQSLDRLMNPLIDQYLYYLSKTINGSGQNQQTLKFSQGGPNTMANQAKNWLPGPCYRQQRVSTTTGQNNNSNFAWTAGTKYHLNGRNSLMNPGPAMASHKEGEDRFFPLSGSLIFGKQNAARDNADYSDVMLTSEEEIKTTNPVATEEYGIVADNLQQQNTAPQIGTVNSQGALPGMVWQNRDVYLQGPIWAKIPHTDGNFHPSPLMGGFGLKHPPPQILIKNTPVPADPPTTFNQSKLNSFITQYSTGQVSVEIEWELQKENSKRWNPEIQYTSNYYKSTSVDFAVNTEGVYSEPHPIGTRYLTRPL

SEQ ID NO: 38 - protein, 599 aa, Artificial Sequence
  AAV214e8 VP2
MAPGKKRPVEPSPQRSPDSSTGIGKKGQQPARKRLNFGQTGDSESVPDPQPLGEPPAAPSGVGPNTMASGGGAPMADNNEGADGVGNASGNWHCDSTWLGDRVITTSTRTWALPTYNNHLYKQISSASTGASNDNHYFGYSTPWGYFDFNRFHCHFSPRDWQRLINNNWGFRPKRLNFKLFNIQVKEVTDNNGVKTIANNLTSTVQVFTDSDYQLPYVLGSAHQGCLPPFPADVFMIPQYGYLTLNDGSQAVGRSSFYCLEYFPSQMLRTGNNFTFSYTFEDVPFHSSYAHSQSLDRLMNPLIDQYLYYLSKTINGSGQNQQTLKFSQGGPNTMANQAKNWLPGPCYRQQRVSTTTGQNNNSNFAWTAGTKYHLNGRNSLMNPGPAMASHKEGEDRFFPLSGSLIFGKQNAARDNADYSDVMLTSEEEIKTTNPVATEEYGIVADNLQQQNTAPQIGTVNSQGALPGMVWQNRDVYLQGPIWAKIPHTDGNFHPSPLMGGFGLKHPPPQILIKNTPVPADPPTTFNQSKLNSFITQYSTGQVSVEIEWELQKENSKRWNPEIQYTSNYYKSTSVDFAVNTEGVYSEPHPIGTRYLTRPL

SEQ ID NO: 39 - protein, 598 aa, Artificial Sequence
  AAV214e9 VP2
MAPGKKRPVEQSPQEPDSSAGIGKSGAQPAKKRLNFGQTGDTESVPDPQPIGEPPAAPSGVGSLTMASGGGAPMADNNEGADGVGNASGNWHCDSTWLGDRVITTSTRTWALPTYNNHLYKQISSASTGASNDNHYFGYSTPWGYFDFNRFHCHFSPRDWQRLINNNWGFRPKRLNFKLFNIQVKEVTDNNGVKTIANNLTSTVQVFTDSDYQLPYVLGSAHQGCLPPFPADVFMIPQYGYLTLNDGSQAVGRSSFYCLEYFPSQMLRTGNNFTFSYTFEDVPFHSSYAHSQSLDRLMNPLIDQYLYYLSKTINGSGQNQQTLKFSQGGPNTMANQAKNWLPGPCYRQQRVSTTTGQNNNSNFAWTAGTKYHLNGRNSLMNPGPAMASHKEGEDRFFPLSGSLIFGKQNAARDNADYSDVMLTSEEEIKTTNPVATEEYGIVADNLQQQNTAPQIGTVNSQGALPGMVWQNRDVYLQGPIWAKIPHTDGNFHPSPLMGGFGLKHPPPQILIKNTPVPADPPTTFNQSKLNSFITQYSTGQVSVEIEWELQKENSKRWNPEIQYTSNYYKSTSVDFAVNTEGVYSEPHPIGTRYLTRPL

SEQ ID NO: 40 - protein, 599 aa, Artificial Sequence
  AAV214e10 VP2
MAPGKKRPVEPSPQRSPDSSTGIGKKGQQPAKKRLNFGQTGDSESVPDPQPIGEPPAGPSGLGSGTMASGGGAPMADNNEGADGVGNASGNWHCDSTWLGDRVITTSTRTWALPTYNNHLYKQISSASTGASNDNHYFGYSTPWGYFDFNRFHCHFSPRDWQRLINNNWGFRPKRLNFKLFNIQVKEVTDNNGVKTIANNLTSTVQVFTDSDYQLPYVLGSAHQGCLPPFPADVFMIPQYGYLTLNDGSQAVGRSSFYCLEYFPSQMLRTGNNFTFSYTFEDVPFHSSYAHSQSLDRLMNPLIDQYLYYLSKTINGSGQNQQTLKFSQGGPNTMANQAKNWLPGPCYRQQRVSTTTGQNNNSNFAWTAGTKYHLNGRNSLMNPGPAMASHKEGEDRFFPLSGSLIFGKQNAARDNADYSDVMLTSEEEIKTTNPVATEEYGIVADNLQQQNTAPQIGTVNSQGALPGMVWQNRDVYLQGPIWAKIPHTDGNFHPSPLMGGFGLKHPPPQILIKNTPVPADPPTTFNQSKLNSFITQYSTGQVSVEIEWELQKENSKRWNPEIQYTSNYYKSTSVDFAVNTEGVYSEPHPIGTRYLTRPL

SEQ ID NO: 41 - protein, 533 aa, Artificial Sequence
  AAV214 VP3
MASGGGAPMADNNEGADGVGNASGNWHCDSTWLGDRVITTSTRTWALPTYNNHLYKQISSASTGASNDNHYFGYSTPWGYFDFNRFHCHFSPRDWQRLINNNWGFRPKRLNFKLFNIQVKEVTDNNGVKTIANNLTSTVQVFTDSDYQLPYVLGSAHQGCLPPFPADVFMIPQYGYLTLNDGSQAVGRSSFYCLEYFPSQMLRTGNNFTFSYTFEDVPFHSSYAHSQSLDRLMNPLIDQYLYYLSKTINGSGQNQQTLKFSQGGPNTMANQAKNWLPGPCYRQQRVSTTTGQNNNSNFAWTAGTKYHLNGRNSLMNPGPAMASHKEGEDRFFPLSGSLIFGKQNAARDNADYSDVMLTSEEEIKTTNPVATEEYGIVADNLQQQNTAPQIGTVNSQGALPGMVWQNRDVYLQGPIWAKIPHTDGNFHPSPLMGGFGLKHPPPQILIKNTPVPADPPTTFNQSKLNSFITQYSTGQVSVEIEWELQKENSKRWNPEIQYTSNYYKSTSVDFAVNTEGVYSEPHPIGTRYLTRPL

SEQ ID NO: 42 - protein, 534 aa, Artificial Sequence
  AAV214A VP3
MASGGGAPMADNNEGADGVGNASGNWHCDSTWLGDRVITTSTRTWALPTYNNHLYKQISNSTSGGSSNDNAYFGYSTPWGYFDFNRFHCHFSPRDWQRLINNNWGFRPKRLNFKLFNIQVKEVTDNNGVKTIANNLTSTVQVFTDSDYQLPYVLGSAHQGCLPPFPADVFMIPQYGYLTLNDGSQAVGRSSFYCLEYFPSQMLRTGNNFTFSYTFEDVPFHSSYAHSQSLDRLMNPLIDQYLYYLSKTINGSGQNQQTLKFSQGGPNTMANQAKNWLPGPCYRQQRVSTTTGQNNNSNFAWTAGTKYHLNGRNSLMNPGPAMASHKEGEDRFFPLSGSLIFGKQNAARDNADYSDVMLTSEEEIKTTNPVATEEYGIVADNLQQQNTAPQIGTVNSQGALPGMVWQNRDVYLQGPIWAKIPHTDGNFHPSPLMGGFGLKHPPPQILIKNTPVPADPPTTFNQSKLNSFITQYSTGQVSVEIEWELQKENSKRWNPEIQYTSNYYKSTSVDFAVNTEGVYSEPHPIGTRYLTRPL

SEQ ID NO: 43 - protein, 533 aa, Artificial Sequence; identical to SEQ ID NO: 41
  AAV214E VP3

SEQ ID NO: 44 - protein, 533 aa, Artificial Sequence; identical to SEQ ID NO: 41
  AAV214E8 VP3

SEQ ID NO: 45 - protein, 533 aa, Artificial Sequence; identical to SEQ ID NO: 41
  AAV214E9 VP3

SEQ ID NO: 46 - protein, 533 aa, Artificial Sequence; identical to SEQ ID NO: 41
  AAV214E10 VP3

SEQ ID NO: 47 - DNA, 2211 bp, Artificial Sequence
  ITB102 45 VP1
atggctgccgatggttatcttccagattggctcgaggacaacctctctgagggcattcgcgagtggtgggcgctgaaacctggagccccgaagcccaaagccaaccagcaaaagcaggacgacggccggggtctggtgcttcctggctacaagtacctcggacccttcaacggactcgacaagggggagcccgtcaacgcggcggacgcagcggccctcgagcacgacaaggcctacgaccagcagctcaaagcgggtgacaatccgtacctgcggtataaccacgccgacgccgagtttcaggagcgtctgcaagaagatacgtcttttgggggcaacctcgggcgagcagtcttccaggccaagaagcgggttctcgaaccttttggtctggttgaggaaggtgctaagacggctcctggaaagaaacgtccggtagagcagtcgccacaagagccagactcctcctcgggcatcggcaagacaggccagcagcccgctaaaaagagactcaattttggtcagactggcgactcagagtcagtccccgacccacaacctctcggagaacctccagcaacccccgctgctgtgggacctactacaatggcttcaggcggtggcgcaccaatggcggacaataacgaaggcgccgacggagtgggtaatgcctcaggaaattggcattgcgattccacatggctgggcgacagagtcatcaccaccagcacccgcacctgggccttgcccacctacaataaccacctctacaagcaaatctccagtgcttcaacgggggccagcaacgacaaccactacttcggctacagcaccccctgggggtattttgacttcaacagattccactgccacttttcaccacgtgactggcaaagactcatcaacaacaactggggattccgacccaagagactcaacttcaagctctttaacattcaagtcaaagaggttacggacaacaatggagtcaagaccatcgccaataaccttaccagcacggtccaggtcttcacggactcagactatcagctcccgtacgtgctcgggtcggctcacgagggctgcctcccgccgttcccagcggacgttttcatgattcctcagtacggctacctaacgctcaacaatggcagccaggcagtgggacggtcatccttttactgcctggaatatttcccatcgcagatgctgagaacgggcaacaactttaccttcagctacacctttgaggacgttcctttccacagcagctacgctcacagccagagtctggaccggctgatgaatcctctgattgaccagtacctgtactacttgtctcggactcaaacaacaggaggcacggcaaatacgcagactctgggcttcagccaaggtgggcctaatacaatggccaatcaggcaaagaactggctgccaggaccctgttaccgccaacaacgcgtctcaacgacaaccgggcaaaacaacaatagcaactttgcctggactgctgggaccaaataccatctgaatggaagaaattcattgatgaatcctggccccgctatggcatcccacaaagagggcgaggaccgtttttttcccctgtccgggtccctgatttttggcaaacaaggcactggcagagacaatgtggatgccgacaaagtcatgatcaccaacgaggaagaaatcaaaaccactaaccctgtggctacagaggaatacggtatcgtggcagataacttgcagcagcaaaacacggctcctcaaattggaactgtcaacagccagggggccttacccggtatggtctggcagaaccgggacgtgtacctgcagggtcccatctgggccaagattcctcacacggacggcaacttccacccgtctccgctgatgggcggctttggcctgaaacatcctccgcctcagatcctgatcaagaacacgcctgtacctgcggatcctccgaccaccttcaaccagtcaaagctgaactctttcatcacgcaatacagcaccggacaggtcagcgtggaaattgaatgggagctgcagaaggaaaacagcaagcgctggaaccccgagatccagtacacctccaactactacaaatctacaagtgtggactttgctgttaatacagaaggcgtgtactctgaaccccaccccattggcacccgttacctcacccgtcccctgtaa

SEQ ID NO: 48 - DNA, 1605 bp, Artificial Sequence
  ITB102 45 VP3
atggcttcaggcggtggcgcaccaatggcggacaataacgaaggcgccgacggagtgggtaatgcctcaggaaattggcattgcgattccacatggctgggcgacagagtcatcaccaccagcacccgcacctgggccttgcccacctacaataaccacctctacaagcaaatctccagtgcttcaacgggggccagcaacgacaaccactacttcggctacagcaccccctgggggtattttgacttcaacagattccactgccacttttcaccacgtgactggcaaagactcatcaacaacaactggggattccgacccaagagactcaacttcaagctctttaacattcaagtcaaagaggttacggacaacaatggagtcaagaccatcgccaataaccttaccagcacggtccaggtcttcacggactcagactatcagctcccgtacgtgctcgggtcggctcacgagggctgcctcccgccgttcccagcggacgttttcatgattcctcagtacggctacctaacgctcaacaatggcagccaggcagtgggacggtcatccttttactgcctggaatatttcccatcgcagatgctgagaacgggcaacaactttaccttcagctacacctttgaggacgttcctttccacagcagctacgctcacagccagagtctggaccggctgatgaatcctctgattgaccagtacctgtactacttgtctcggactcaaacaacaggaggcacggcaaatacgcagactctgggcttcagccaaggtgggcctaatacaatggccaatcaggcaaagaactggctgccaggaccctgttaccgccaacaacgcgtctcaacgacaaccgggcaaaacaacaatagcaactttgcctggactgctgggaccaaataccatctgaatggaagaaattcattgatgaatcctggccccgctatggcatcccacaaagagggcgaggaccgtttttttcccctgtccgggtccctgatttttggcaaacaaggcactggcagagacaatgtggatgccgacaaagtcatgatcaccaacgaggaagaaatcaaaaccactaaccctgtggctacagaggaatacggtatcgtggcagataacttgcagcagcaaaacacggctcctcaaattggaactgtcaacagccagggggccttacccggtatggtctggcagaaccgggacgtgtacctgcagggtcccatctgggccaagattcctcacacggacggcaacttccacccgtctccgctgatgggcggctttggcctgaaacatcctccgcctcagatcctgatcaagaacacgcctgtacctgcggatcctccgaccaccttcaaccagtcaaagctgaactctttcatcacgcaatacagcaccggacaggtcagcgtggaaattgaatgggagctgcagaaggaaaacagcaagcgctggaaccccgagatccagtacacctccaactactacaaatctacaagtgtggactttgctgttaatacagaaggcgtgtactctgaaccccaccccattggcacccgttacctcacccgtcccctgtaa

SEQ ID NO: 49 - protein, 736 aa, Artificial Sequence
  ITB102 45 VP1
MAADGYLPDWLEDNLSEGIREWWALKPGAPKPKANQQKQDDGRGLVLPGYKYLGPFNGLDKGEPVNAADAAALEHDKAYDQQLKAGDNPYLRYNHADAEFQERLQEDTSFGGNLGRAVFQAKKRVLEPFGLVEEGAKTAPGKKRPVEQSPQEPDSSSGIGKTGQQPAKKRLNFGQTGDSESVPDPQPLGEPPATPAAVGPTTMASGGGAPMADNNEGADGVGNASGNWHCDSTWLGDRVITTSTRTWALPTYNNHLYKQISSASTGASNDNHYFGYSTPWGYFDFNRFHCHFSPRDWQRLINNNWGFRPKRLNFKLFNIQVKEVTDNNGVKTIANNLTSTVQVFTDSDYQLPYVLGSAHEGCLPPFPADVFMIPQYGYLTLNNGSQAVGRSSFYCLEYFPSQMLRTGNNFTFSYTFEDVPFHSSYAHSQSLDRLMNPLIDQYLYYLSRTQTTGGTANTQTLGFSQGGPNTMANQAKNWLPGPCYRQQRVSTTTGQNNNSNFAWTAGTKYHLNGRNSLMNPGPAMASHKEGEDRFFPLSGSLIFGKQGTGRDNVDADKVMITNEEEIKTTNPVATEEYGIVADNLQQQNTAPQIGTVNSQGALPGMVWQNRDVYLQGPIWAKIPHTDGNFHPSPLMGGFGLKHPPPQILIKNTPVPADPPTTFNQSKLNSFITQYSTGQVSVEIEWELQKENSKRWNPEIQYTSNYYKSTSVDFAVNTEGVYSEPHPIGTRYLTRPL

SEQ ID NO: 50 - protein, 599 aa, Artificial Sequence
  ITB102 45 VP2
MAPGKKRPVEQSPQEPDSSSGIGKTGQQPAKKRLNFGQTGDSESVPDPQPLGEPPATPAAVGPTTMASGGGAPMADNNEGADGVGNASGNWHCDSTWLGDRVITTSTRTWALPTYNNHLYKQISSASTGASNDNHYFGYSTPWGYFDFNRFHCHFSPRDWQRLINNNWGFRPKRLNFKLFNIQVKEVTDNNGVKTIANNLTSTVQVFTDSDYQLPYVLGSAHEGCLPPFPADVFMIPQYGYLTLNNGSQAVGRSSFYCLEYFPSQMLRTGNNFTFSYTFEDVPFHSSYAHSQSLDRLMNPLIDQYLYYLSRTQTTGGTANTQTLGFSQGGPNTMANQAKNWLPGPCYRQQRVSTTTGQNNNSNFAWTAGTKYHLNGRNSLMNPGPAMASHKEGEDRFFPLSGSLIFGKQGTGRDNVDADKVMITNEEEIKTTNPVATEEYGIVADNLQQQNTAPQIGTVNSQGALPGMVWQNRDVYLQGPIWAKIPHTDGNFHPSPLMGGFGLKHPPPQILIKNTPVPADPPTTFNQSKLNSFITQYSTGQVSVEIEWELQKENSKRWNPEIQYTSNYYKSTSVDFAVNTEGVYSEPHPIGTRYLTRPL

SEQ ID NO: 51 - protein, 534 aa, Artificial Sequence
  ITB102 45 VP3
MASGGGAPMADNNEGADGVGNASGNWHCDSTWLGDRVITTSTRTWALPTYNNHLYKQISSASTGASNDNHYFGYSTPWGYFDFNRFHCHFSPRDWQRLINNNWGFRPKRLNFKLFNIQVKEVTDNNGVKTIANNLTSTVQVFTDSDYQLPYVLGSAHEGCLPPFPADVFMIPQYGYLTLNNGSQAVGRSSFYCLEYFPSQMLRTGNNFTFSYTFEDVPFHSSYAHSQSLDRLMNPLIDQYLYYLSRTQTTGGTANTQTLGFSQGGPNTMANQAKNWLPGPCYRQQRVSTTTGQNNNSNFAWTAGTKYHLNGRNSLMNPGPAMASHKEGEDRFFPLSGSLIFGKQGTGRDNVDADKVMITNEEEIKTTNPVATEEYGIVADNLQQQNTAPQIGTVNSQGALPGMVWQNRDVYLQGPIWAKIPHTDGNFHPSPLMGGFGLKHPPPQILIKNTPVPADPPTTFNQSKLNSFITQYSTGQVSVEIEWELQKENSKRWNPEIQYTSNYYKSTSVDFAVNTEGVYSEPHPIGTRYLTRPL

SEQ ID NO: 52 - protein, 7 aa, Artificial Sequence
  VR-I
SASTGAS

SEQ ID NO: 53 - protein, 8 aa, Artificial Sequence
  VR-I
NSTSGGSS

SEQ ID NO: 54 - protein, 6 aa, Artificial Sequence
  VR-II
DNNGVK

SEQ ID NO: 55 - protein, 4 aa, Artificial Sequence
  VR-III
NDGS

SEQ ID NO: 56 - protein, 10 aa, Artificial Sequence
  VR-IV
INGSGQNQQT

SEQ ID NO: 57 - protein, 18 aa, Artificial Sequence
  VR-V
RVSTTTGQNNNSNFAWTA

SEQ ID NO: 58 - protein, 13 aa, Artificial Sequence
  VR-VI
HKEGEDRFFPLSG

SEQ ID NO: 59 - protein, 14 aa, Artificial Sequence
  VR-VII
KQNAARDNADYSDV

SEQ ID NO: 60 - protein, 13 aa, Artificial Sequence
  VR-VIII
ADNLQQQNTAPQI

SEQ ID NO: 61 - protein, 10 aa, Artificial Sequence
  VR-IX
NYYKSTSVDF

SEQ ID NO: 62 - DNA, 2211 bp, Artificial Sequence
  AAV6 VP1
atggctgccgatggttatcttccagattggctcgaggacaacctctctgagggcattcgcgagtggtgggacttgaaacctggagccccgaaacccaaagccaaccagcaaaagcaggacgacggccggggtctggtgcttcctggctacaagtacctcggacccttcaacggactcgacaagggggagcccgtcaacgcggcggatgcagcggccctcgagcacgacaaggcctacgaccagcagctcaaagcgggtgacaatccgtacctgcggtataaccacgccgacgccgagtttcaggagcgtctgcaagaagatacgtcttttgggggcaacctcgggcgagcagtcttccaggccaagaagagggttctcgaaccttttggtctggttgaggaaggtgctaagacggctcctggaaagaaacgtccggtagagcagtcgccacaagagccagactcctcctcgggcattggcaagacaggccagcagcccgctaaaaagagactcaattttggtcagactggcgactcagagtcagtccccgacccacaacctctcggagaacctccagcaacccccgctgctgtgggacctactacaatggcttcaggcggtggcgcaccaatggcagacaataacgaaggcgccgacggagtgggtaatgcctcaggaaattggcattgcgattccacatggctgggcgacagagtcatcaccaccagcacccgaacatgggccttgcccacctataacaaccacctctacaagcaaatctccagtgcttcaacgggggccagcaacgacaaccactacttcggctacagcaccccctgggggtattttgatttcaacagattccactgccatttctcaccacgtgactggcagcgactcatcaacaacaattggggattccggcccaagagactcaacttcaagctcttcaacatccaagtcaaggaggtcacgacgaatgatggcgtcacgaccatcgctaataaccttaccagcacggttcaagtcttctcggactcggagtaccagttgccgtacgtcctcggctctgcgcaccagggctgcctccctccgttcccggcggacgtgttcatgattccgcagtacggctacctaacgctcaacaatggcagccaggcagtgggacggtcatccttttactgcctggaatatttcccatcgcagatgctgagaacgggcaataactttaccttcagctacaccttcgaggacgtgcctttccacagcagctacgcgcacagccagagcctggaccggctgatgaatcctctcatcgaccagtacctgtattacctgaacagaactcagaatcagtccggaagtgcccaaaacaaggacttgctgtttagccgggggtctccagctggcatgtctgttcagcccaaaaactggctacctggaccctgttaccggcagcagcgcgtttctaaaacaaaaacagacaacaacaacagcaactttacctggactggtgcttcaaaatataaccttaatgggcgtgaatctataatcaaccctggcactgctatggcctcacacaaagacgacaaagacaagttctttcccatgagcggtgtcatgatttttggaaaggagagcgccggagcttcaaacactgcattggacaatgtcatgatcacagacgaagaggaaatcaaagccactaaccccgtggccaccgaaagatttgggactgtggcagtcaatctccagagcagcagcacagaccctgcgaccggagatgtgcatgttatgggagccttacctggaatggtgtggcaagacagagacgtatacctgcagggtcctatttgggccaaaattcctcacacggatggacactttcacccgtctcctctcatgggcggctttggacttaagcacccgcctcctcagatcctcatcaaaaacacgcctgttcctgcgaatcctccggcagagttttcggctacaaagtttgcttcattcatcacccagtattccacaggacaagtgagcgtggagattgaatgggagctgcagaaagaaaacagcaaacgctggaatcccgaagtgcagtatacatctaactatgcaaaatctgccaacgttgatttcactgtggacaacaatggactttatactgagcctcgccccattggcacccgttacctcacccgtcccctgtaa

SEQ ID NO: 63 - protein, 736 aa, Artificial Sequence
  AAV6 VP1
MAADGYLPDWLEDNLSEGIREWWDLKPGAPKPKANQQKQDDGRGLVLPGYKYLGPFNGLDKGEPVNAADAAALEHDKAYDQQLKAGDNPYLRYNHADAEFQERLQEDTSFGGNLGRAVFQAKKRVLEPFGLVEEGAKTAPGKKRPVEQSPQEPDSSSGIGKTGQQPAKKRLNFGQTGDSESVPDPQPLGEPPATPAAVGPTTMASGGGAPMADNNEGADGVGNASGNWHCDSTWLGDRVITTSTRTWALPTYNNHLYKQISSASTGASNDNHYFGYSTPWGYFDFNRFHCHFSPRDWQRLINNNWGFRPKRLNFKLFNIQVKEVTTNDGVTTIANNLTSTVQVFSDSEYQLPYVLGSAHQGCLPPFPADVFMIPQYGYLTLNNGSQAVGRSSFYCLEYFPSQMLRTGNNFTFSYTFEDVPFHSSYAHSQSLDRLMNPLIDQYLYYLNRTQNQSGSAQNKDLLFSRGSPAGMSVQPKNWLPGPCYRQQRVSKTKTDNNNSNFTWTGASKYNLNGRESIINPGTAMASHKDDKDKFFPMSGVMIFGKESAGASNTALDNVMITDEEEIKATNPVATERFGTVAVNLQSSSTDPATGDVHVMGALPGMVWQDRDVYLQGPIWAKIPHTDGHFHPSPLMGGFGLKHPPPQILIKNTPVPANPPAEFSATKFASFITQYSTGQVSVEIEWELQKENSKRWNPEVQYTSNYAKSANVDFTVDNNGLYTEPRPIGTRYLTRPL

SEQ ID NO: 64 - protein, 599 aa, Artificial Sequence
  AAV6 VP2
TAPGKKRPVEQSPQEPDSSSGIGKTGQQPAKKRLNFGQTGDSESVPDPQPLGEPPATPAAVGPTTMASGGGAPMADNNEGADGVGNASGNWHCDSTWLGDRVITTSTRTWALPTYNNHLYKQISSASTGASNDNHYFGYSTPWGYFDFNRFHCHFSPRDWQRLINNNWGFRPKRLNFKLFNIQVKEVTTNDGVTTIANNLTSTVQVFSDSEYQLPYVLGSAHQGCLPPFPADVFMIPQYGYLTLNNGSQAVGRSSFYCLEYFPSQMLRTGNNFTFSYTFEDVPFHSSYAHSQSLDRLMNPLIDQYLYYLNRTQNQSGSAQNKDLLFSRGSPAGMSVQPKNWLPGPCYRQQRVSKTKTDNNNSNFTWTGASKYNLNGRESIINPGTAMASHKDDKDKFFPMSGVMIFGKESAGASNTALDNVMITDEEEIKATNPVATERFGTVAVNLQSSSTDPATGDVHVMGALPGMVWQDRDVYLQGPIWAKIPHTDGHFHPSPLMGGFGLKHPPPQILIKNTPVPANPPAEFSATKFASFITQYSTGQVSVEIEWELQKENSKRWNPEVQYTSNYAKSANVDFTVDNNGLYTEPRPIGTRYLTRPL

SEQ ID NO: 65 - protein, 534 aa, Artificial Sequence
  AAV6 VP3
MASGGGAPMADNNEGADGVGNASGNWHCDSTWLGDRVITTSTRTWALPTYNNHLYKQISSASTGASNDNHYFGYSTPWGYFDFNRFHCHFSPRDWQRLINNNWGFRPKRLNFKLFNIQVKEVTTNDGVTTIANNLTSTVQVFSDSEYQLPYVLGSAHQGCLPPFPADVFMIPQYGYLTLNNGSQAVGRSSFYCLEYFPSQMLRTGNNFTFSYTFEDVPFHSSYAHSQSLDRLMNPLIDQYLYYLNRTQNQSGSAQNKDLLFSRGSPAGMSVQPKNWLPGPCYRQQRVSKTKTDNNNSNFTWTGASKYNLNGRESIINPGTAMASHKDDKDKFFPMSGVMIFGKESAGASNTALDNVMITDEEEIKATNPVATERFGTVAVNLQSSSTDPATGDVHVMGALPGMVWQDRDVYLQGPIWAKIPHTDGHFHPSPLMGGFGLKHPPPQILIKNTPVPANPPAEFSATKFASFITQYSTGQVSVEIEWELQKENSKRWNPEVQYTSNYAKSANVDFTVDNNGLYTEPRPIGTRYLTRPL

SEQ ID NO: 66 - DNA, 2217 bp, Artificial Sequence
  AAV8 VP1
atggctgccgatggttatcttccagattggctcgaggacaacctctctgagggcattcgcgagtggtgggcgctgaaacctggagccccgaagcccaaagccaaccagcaaaagcaggacgacggccggggtctggtgcttcctggctacaagtacctcggacccttcaacggactcgacaagggggagcccgtcaacgcggcggacgcagcggccctcgagcacgacaaggcctacgaccagcagctgcaggcgggtgacaatccgtacctgcggtataaccacgccgacgccgagtttcaggagcgtctgcaagaagatacgtcttttgggggcaacctcgggcgagcagtcttccaggccaagaagcgggttctcgaacctctcggtctggttgaggaaggcgctaagacggctcctggaaagaagagaccggtagagccatcaccccagcgttctccagactcctctacgggcatcggcaagaaaggccaacagcccgccagaaaaagactcaattttggtcagactggcgactcagagtcagttccagaccctcaacctctcggagaacctccagcagcgccctctggtgtgggacctaatacaatggctgcaggcggtggcgcaccaatggcagacaataacgaaggcgccgacggagtgggtagttcctcgggaaattggcattgcgattccacatggctgggcgacagagtcatcaccaccagcacccgaacctgggccctgcccacctacaacaaccacctctacaagcaaatctccaacgggacatcgggaggagccaccaacgacaacacctacttcggctacagcaccccctgggggtattttgactttaacagattccactgccacttttcaccacgtgactggcagcgactcatcaacaacaactggggattccggcccaagagactcagcttcaagctcttcaacatccaggtcaaggaggtcacgcagaatgaaggcaccaagaccatcgccaataacctcaccagcaccatccaggtgtttacggactcggagtaccagctgccgtacgttctcggctctgcccaccagggctgcctgcctccgttcccggcggacgtgttcatgattccccagtacggctacctaacactcaacaacggtagtcaggccgtgggacgctcctccttctactgcctggaatactttccttcgcagatgctgagaaccggcaacaacttccagtttacttacaccttcgaggacgtgcctttccacagcagctacgcccacagccagagcttggaccggctgatgaatcctctgattgaccagtacctgtactacttgtctcggactcaaacaacaggaggcacggcaaatacgcagactctgggcttcagccaaggtgggcctaatacaatggccaatcaggcaaagaactggctgccaggaccctgttaccgccaacaacgcgtctcaacgacaaccgggcaaaacaacaatagcaactttgcctggactgctgggaccaaataccatctgaatggaagaaattcattggctaatcctggcatcgctatggcaacacacaaagacgacgaggagcgtttttttcccagtaacgggatcctgatttttggcaaacaaaatgctgccagagacaatgcggattacagcgatgtcatgctcaccagcgaggaagaaatcaaaaccactaaccctgtggctacagaggaatacggtatcgtggcagataacttgcagcagcaaaacacggctcctcaaattggaactgtcaacagccagggggccttacccggtatggtctggcagaaccgggacgtgtacctgcagggtcccatctgggccaagattcctcacacggacggcaacttccacccgtctccgctgatgggcggctttggcctgaaacatcctccgcctcagatcctgatcaagaacacgcctgtacctgcggatcctccgaccaccttcaaccagtcaaagctgaactctttcatcacgcaatacagcaccggacaggtcagcgtggaaattgaatgggagctgcagaaggaaaacagcaagcgctggaaccccgagatccagtacacctccaactactacaaatctacaagtgtggactttgctgttaatacagaaggcgtgtactctgaaccccgccccattggcacccgttacctcacccgtaatctgtaa

SEQ ID NO: 67 - protein, 738 aa, Artificial Sequence
  AAV8 VP1
MAADGYLPDWLEDNLSEGIREWWALKPGAPKPKANQQKQDDGRGLVLPGYKYLGPFNGLDKGEPVNAADAAALEHDKAYDQQLQAGDNPYLRYNHADAEFQERLQEDTSFGGNLGRAVFQAKKRVLEPLGLVEEGAKTAPGKKRPVEPSPQRSPDSSTGIGKKGQQPARKRLNFGQTGDSESVPDPQPLGEPPAAPSGVGPNTMAAGGGAPMADNNEGADGVGSSSGNWHCDSTWLGDRVITTSTRTWALPTYNNHLYKQISNGTSGGATNDNTYFGYSTPWGYFDFNRFHCHFSPRDWQRLINNNWGFRPKRLSFKLFNIQVKEVTQNEGTKTIANNLTSTIQVFTDSEYQLPYVLGSAHQGCLPPFPADVFMIPQYGYLTLNNGSQAVGRSSFYCLEYFPSQMLRTGNNFQFTYTFEDVPFHSSYAHSQSLDRLMNPLIDQYLYYLSRTQTTGGTANTQTLGFSQGGPNTMANQAKNWLPGPCYRQQRVSTTTGQNNNSNFAWTAGTKYHLNGRNSLANPGIAMATHKDDEERFFPSNGILIFGKQNAARDNADYSDVMLTSEEEIKTTNPVATEEYGIVADNLQQQNTAPQIGTVNSQGALPGMVWQNRDVYLQGPIWAKIPHTDGNFHPSPLMGGFGLKHPPPQILIKNTPVPADPPTTFNQSKLNSFITQYSTGQVSVEIEWELQKENSKRWNPEIQYTSNYYKSTSVDFAVNTEGVYSEPRPIGTRYLTRNL

SEQ ID NO: 68 - protein, 601 aa, Artificial Sequence
  AAV8 VP2
MAPGKKRPVEPSPQRSPDSSTGIGKKGQQPARKRLNFGQTGDSESVPDPQPLGEPPAAPSGVGPNTMAAGGGAPMADNNEGADGVGSSSGNWHCDSTWLGDRVITTSTRTWALPTYNNHLYKQISNGTSGGATNDNTYFGYSTPWGYFDFNRFHCHFSPRDWQRLINNNWGFRPKRLSFKLFNIQVKEVTQNEGTKTIANNLTSTIQVFTDSEYQLPYVLGSAHQGCLPPFPADVFMIPQYGYLTLNNGSQAVGRSSFYCLEYFPSQMLRTGNNFQFTYTFEDVPFHSSYAHSQSLDRLMNPLIDQYLYYLSRTQTTGGTANTQTLGFSQGGPNTMANQAKNWLPGPCYRQQRVSTTTGQNNNSNFAWTAGTKYHLNGRNSLANPGIAMATHKDDEERFFPSNGILIFGKQNAARDNADYSDVMLTSEEEIKTTNPVATEEYGIVADNLQQQNTAPQIGTVNSQGALPGMVWQNRDVYLQGPIWAKIPHTDGNFHPSPLMGGFGLKHPPPQILIKNTPVPADPPTTFNQSKLNSFITQYSTGQVSVEIEWELQKENSKRWNPEIQYTSNYYKSTSVDFAVNTEGVYSEPRPIGTRYLTRNL

SEQ ID NO: 69 - protein, 535 aa, Artificial Sequence
  AAV8 VP3
MAAGGGAPMADNNEGADGVGSSSGNWHCDSTWLGDRVITTSTRTWALPTYNNHLYKQISNGTSGGATNDNTYFGYSTPWGYFDFNRFHCHFSPRDWQRLINNNWGFRPKRLSFKLFNIQVKEVTQNEGTKTIANNLTSTIQVFTDSEYQLPYVLGSAHQGCLPPFPADVFMIPQYGYLTLNNGSQAVGRSSFYCLEYFPSQMLRTGNNFQFTYTFEDVPFHSSYAHSQSLDRLMNPLIDQYLYYLSRTQTTGGTANTQTLGFSQGGPNTMANQAKNWLPGPCYRQQRVSTTTGQNNNSNFAWTAGTKYHLNGRNSLANPGIAMATHKDDEERFFPSNGILIFGKQNAARDNADYSDVMLTSEEEIKTTNPVATEEYGIVADNLQQQNTAPQIGTVNSQGALPGMVWQNRDVYLQGPIWAKIPHTDGNFHPSPLMGGFGLKHPPPQILIKNTPVPADPPTTFNQSKLNSFITQYSTGQVSVEIEWELQKENSKRWNPEIQYTSNYYKSTSVDFAVNTEGVYSEPRPIGTRYLTRNL

SEQ ID NO: 70 - DNA, 2214 bp, Artificial Sequence
  AAV9 VP1
atggctgccgatggttatcttccagattggctcgaggacaacctctctgagggcattcgcgagtggtgggcgctgaaacctggagccccgaagcccaaagccaaccagcaaaagcaggacgacggccggggtctggtgcttcctggctacaagtacctcggacccttcaacggactcgacaagggggagcccgtcaacgcggcggacgcagcggccctcgagcacggcaaggcctacgaccagcagctgcaggcgggtgacaatccgtacctgcggtataaccacgccgacgccgagtttcaggagcgtctgcaagaagatacgtcttttgggggcaacctcgggcgagcagtcttccaggccaagaagcgggttctcgaacctctcggtctggttgaggaaggcgctaagacggctcctggaaagaagagaccggtagagccatcaccccagcgttctccagactcctctacgggcatcggcaagaaaggccaacagcccgccagaaaaagactcaattttggtcagactggcgactcagagtcagttccagaccctcaacctctcggagaacctccagcagcgccctctggtgtgggacctaatacaatggctgcaggcggtggcgcaccaatggcagacaataacgaaggcgccgacggagtgggtaattcctcgggaaattggcattgcgattccacatggctgggggacagagtcatcaccaccagcacccgaacctgggcattgcccacctacaacaaccacctctacaagcaaatctccaatggaacatcgggaggaagcaccaacgacaacacctactttggctacagcaccccctgggggtattttgacttcaacagattccactgccacttctcaccacgtgactggcagcgactcatcaacaacaactggggattccggccaaagagactcaacttcaagctgttcaacatccaggtcaaggaggttacgacgaacgaaggcaccaagaccatcgccaataaccttaccagcaccgtccaggtctttacggactcggagtaccagctaccgtacgtcctaggctctgcccaccaaggatgcctgccaccgtttcctgcagacgtcttcatggttcctcagtacggctacctgacgctcaacaatggaagtcaagcgttaggacgttcttctttctactgtctggaatacttcccttctcagatgctgagaaccggcaacaactttcagttcagctacactttcgaggacgtgcctttccacagcagctacgcacacagccagagtctagatcgactgatgaaccccctcatcgaccagtacctatactacctggtcagaacacagacaactggaactgggggaactcaaactttggcattcagccaagcaggccctagctcaatggccaatcaggctagaaactgggtacccgggccttgctaccgtcagcagcgcgtctccacaaccaccaaccaaaataacaacagcaactttgcgtggacgggagctgctaaattcaagctgaacgggagagactcgctaatgaatcctggcgtggctatggcatcgcacaaagacgacgaggaccgcttctttccatcaagtggcgttctcatatttggcaagcaaggagccgggaacgatggagtcgactacagccaggtgctgattacagatgaggaagaaattaaagccaccaaccctgtagccacagaggaatacggagcagtggccatcaacaaccaggccgctaacacgcaggcgcaaactggacttgtgcataaccagggagttattcctggtatggtctggcagaaccgggacgtgtacctgcagggccctatttgggctaaaatacctcacacagatggcaactttcacccgtctcctctgatgggtggatttggactgaaacacccacctccacagattctaattaaaaatacaccagtgccggcagatcctcctcttaccttcaatcaagccaagctgaactctttcatcacgcagtacagcacgggacaagtcagcgtggaaatcgagtgggagctgcagaaagaaaacagcaagcgctggaatccagagatccagtatacttcaaactactacaaatctacaaatgtggactttgctgtcaataccaaaggtgtttactctgagcctcgccccattggtactcgttacctcacccgtaatttgtaa

SEQ ID NO: 71 - protein, 736 aa, Artificial Sequence
  AAV9 VP1
MAADGYLPDWLEDNLSEGIREWWALKPGAPQPKANQQHQDNARGLVLPGYKYLGPGNGLDKGEPVNAADAAALEHDKAYDQQLKAGDNPYLKYNHADAEFQERLKEDTSFGGNLGRAVFQAKKRLLEPLGLVEEAAKTAPGKKRPVEQSPQEPDSSAGIGKSGAQPAKKRLNFGQTGDTESVPDPQPIGEPPAAPSGVGSLTMASGGGAPVADNNEGADGVGSSSGNWHCDSQWLGDRVITTSTRTWALPTYNNHLYKQISNSTSGGSSNDNAYFGYSTPWGYFDFNRFHCHFSPRDWQRLINNNWGFRPKRLNFKLFNIQVKEVTDNNGVKTIANNLTSTVQVFTDSDYQLPYVLGSAHEGCLPPFPADVFMIPQYGYLTLNDGSQAVGRSSFYCLEYFPSQMLRTGNNFQFSYEFENVPFHSSYAHSQSLDRLMNPLIDQYLYYLSKTINGSGQNQQTLKFSVAGPSNMAVQGRNYIPGPSYRQQRVSTTVTQNNNSEFAWPGASSWALNGRNSLMNPGPAMASHKEGEDRFFPLSGSLIFGKQGTGRDNVDADKVMITNEEEIKTTNPVATESYGQVATNHQSAQAQAQTGWVQNQGILPGMVWQDRDVYLQGPIWAKIPHTDGNFHPSPLMGGFGMKHPPPQILIKNTPVPADPPTAFNKDKLNSFITQYSTGQVSVEIEWELQKENSKRWNPEIQYTSNYYKSNNVEFAVNTEGVYSEPRPIGTRYLTRNL

SEQ ID NO: 72 - protein, 599 aa, Artificial Sequence
  AAV9 VP2
MAPGKKRPVEQSPQEPDSSAGIGKSGAQPAKKRLNFGQTGDTESVPDPQPIGEPPAAPSGVGSLTMASGGGAPVADNNEGADGVGSSSGNWHCDSQWLGDRVITTSTRTWALPTYNNHLYKQISNSTSGGSSNDNAYFGYSTPWGYFDFNRFHCHFSPRDWQRLINNNWGFRPKRLNFKLFNIQVKEVTDNNGVKTIANNLTSTVQVFTDSDYQLPYVLGSAHEGCLPPFPADVFMIPQYGYLTLNDGSQAVGRSSFYCLEYFPSQMLRTGNNFQFSYEFENVPFHSSYAHSQSLDRLMNPLIDQYLYYLSKTINGSGQNQQTLKFSVAGPSNMAVQGRNYIPGPSYRQQRVSTTVTQNNNSEFAWPGASSWALNGRNSLMNPGPAMASHKEGEDRFFPLSGSLIFGKQGTGRDNVDADKVMITNEEEIKTTNPVATESYGQVATNHQSAQAQAQTGWVQNQGILPGMVWQDRDVYLQGPIWAKIPHTDGNFHPSPLMGGFGMKHPPPQILIKNTPVPADPPTAFNKDKLNSFITQYSTGQVSVEIEWELQKENSKRWNPEIQYTSNYYKSNNVEFAVNTEGVYSEPRPIGTRYLTRNL

SEQ ID NO: 73 - protein, 534 aa, Artificial Sequence
  AAV9 VP3
MASGGGAPVADNNEGADGVGSSSGNWHCDSQWLGDRVITTSTRTWALPTYNNHLYKQISNSTSGGSSNDNAYFGYSTPWGYFDFNRFHCHFSPRDWQRLINNNWGFRPKRLNFKLFNIQVKEVTDNNGVKTIANNLTSTVQVFTDSDYQLPYVLGSAHEGCLPPFPADVFMIPQYGYLTLNDGSQAVGRSSFYCLEYFPSQMLRTGNNFQFSYEFENVPFHSSYAHSQSLDRLMNPLIDQYLYYLSKTINGSGQNQQTLKFSVAGPSNMAVQGRNYIPGPSYRQQRVSTTVTQNNNSEFAWPGASSWALNGRNSLMNPGPAMASHKEGEDRFFPLSGSLIFGKQGTGRDNVDADKVMITNEEEIKTTNPVATESYGQVATNHQSAQAQAQTGWVQNQGILPGMVWQDRDVYLQGPIWAKIPHTDGNFHPSPLMGGFGMKHPPPQILIKNTPVPADPPTAFNKDKLNSFITQYSTGQVSVEIEWELQKENSKRWNPEIQYTSNYYKSNNVEFAVNTEGVYSEPRPIGTRYLTRNL

SEQ ID NO: 74 - protein, 6 aa, Artificial Sequence
  VRII-204/AAV6
TNDGVK

SEQ ID NO: 75 - protein, 4 aa, Artificial Sequence
  VRIII-204/AAV6
NNGS

SEQ ID NO: 76 - protein, 11 aa, Artificial Sequence
  VRIV-204/AAV6
QNQSGSAQNKD

SEQ ID NO: 77 - protein, 18 aa, Artificial Sequence
  VRV-204/AAV6
RVSKTKTDNNNSNFTWTG

SEQ ID NO: 78 - protein, 13 aa, Artificial Sequence
  VRVI-204/AAV6
HKDDKDKFFPMSG

SEQ ID NO: 79 - protein, 14 aa, Artificial Sequence
  VRVII-204/AAV6
KESAGASNTALDNV

SEQ ID NO: 80 - protein, 13 aa, Artificial Sequence
  VRVIII-204/AAV6
AVNLQNSSTDPAT

SEQ ID NO: 81 - protein, 10 aa, Artificial Sequence
  VRIX-204/AAV6
NYAKSANVDF

SEQ ID NO: 82 - DNA, 2211 bp, Artificial Sequence
  AAV214-AB VP1
atggctgccgatggttatcttccagattggctcgaggacaacctctctgagggcattcgcgagtggtgggcgctgaaacctggagccccgaagcccaaagccaaccagcaaaagcaggacgacggccggggtctggtgcttcctggctacaagtacctcggacccttcaacggactcgacaagggggagcccgtcaacgcggcggacgcagcggccctcgagcacgacaaggcctacgaccagcagctcaaagcgggtgacaatccgtacctgcggtataaccacgccgacgccgagtttcaggagcgtctgcaagaagatacgtcttttgggggcaacctcgggcgagcagtcttccaggccaagaagcgggttctcgaaccttttggtctggttgaggaaggtgctaagacggctcctggaaagaaacgtccggtagagcagtcgccacaagagccagactcctcctcgggcatcggcaagacaggccagcagcccgctaaaaagagactcaattttggtcagactggcgactcagagtcagtccccgacccacaacctctcggagaacctccagcaacccccgctgctgtgggacctactacaatggcttcaggcggtggcgcaccaatggcggacaataacgaaggcgccgacggagtgggtaatgcctcaggaaattggcattgcgattccacatggctgggcgacagagtcatcaccaccagcacccgcacctgggccttgcccacctacaataaccacctctacaagcaaatctccagcagcacatctggaggatcttcaaatgacaacgcctacttcggctacagcaccccctgggggtattttgacttcaacagattccactgccacttttcaccacgtgactggcaaagactcatcaacaacaactggggattccgacccaagagactcaacttcaagctctttaacattcaagtcaaagaggttacggacaacaatggagtcaagaccatcgccaataaccttaccagcacggtccaggtcttcacggactcagactatcagctcccgtacgtcctcggctctgcgcaccagggctgcctccctccgttcccggcggacgtgttcatgattccgcagtacggctacctaacgctcaacgacggcagccaggcagtgggacggtcatccttttactgcctggaatatttcccatcgcagatgctgagaacgggcaacaactttaccttcagctacacctttgaggacgttcctttccacagcagctacgctcacagccagagtctggaccgtctcatgaatcctctgattgaccagtacctgtactacttgtctaagactatcaacggatccggccagaatcagcagactctgaagttcagccaaggtgggcctaatacaatggccaatcaggcaaagaactggctgccaggaccctgttaccgccaacaacgcgtctcaacgacaaccgggcaaaacaacaatagcaactttgcctggactgctgggaccaaataccatctgaatggaagaaattcattgatgaatcctggccccgctatggcatcccacaaagagggcgaggaccgtttttttcccctgtccgggtccctgatttttggcaaacaaaatgctgccagagacaatgcggattacagcgatgtcatgctcaccagcgaggaagaaatcaaaaccactaaccctgtggctacagaggaatacggtatcgtggcagataacttgcagcagcaaaacacggctcctcaaattggaactgtcaacagccagggggccttacccggtatggtctggcagaaccgggacgtgtacctgcagggtcccatctgggccaagattcctcacacggacggcaacttccacccgtctccgctgatgggcggctttggcctgaaacatcctccgcctcagatcctgatcaagaacacgcctgtacctgcggatcctccgaccaccttcaaccagtcaaagctgaactctttcatcacgcaatacagcaccggacaggtcagcgtggaaattgaatgggagctgcagaaggaaaacagcaagcgctggaaccccgagatccagtacacctccaactactacaaatctacaagtgtggactttgctgttaatacagaaggcgtgtactctgaaccccaccccattggcacccgttacctcacccgtcccctgtaa

SEQ ID NO: 83 - DNA, 1605 bp, Artificial Sequence
  AAV214-AB VP3
atggcttcaggcggtggcgcaccaatggcggacaataacgaaggcgccgacggagtgggtaatgcctcaggaaattggcattgcgattccacatggctgggcgacagagtcatcaccaccagcacccgcacctgggccttgcccacctacaataaccacctctacaagcaaatctccagcagcacatctggaggatcttcaaatgacaacgcctacttcggctacagcaccccctgggggtattttgacttcaacagattccactgccacttttcaccacgtgactggcaaagactcatcaacaacaactggggattccgacccaagagactcaacttcaagctctttaacattcaagtcaaagaggttacggacaacaatggagtcaagaccatcgccaataaccttaccagcacggtccaggtcttcacggactcagactatcagctcccgtacgtcctcggctctgcgcaccagggctgcctccctccgttcccggcggacgtgttcatgattccgcagtacggctacctaacgctcaacgacggcagccaggcagtgggacggtcatccttttactgcctggaatatttcccatcgcagatgctgagaacgggcaacaactttaccttcagctacacctttgaggacgttcctttccacagcagctacgctcacagccagagtctggaccgtctcatgaatcctctgattgaccagtacctgtactacttgtctaagactatcaacggatccggccagaatcagcagactctgaagttcagccaaggtgggcctaatacaatggccaatcaggcaaagaactggctgccaggaccctgttaccgccaacaacgcgtctcaacgacaaccgggcaaaacaacaatagcaactttgcctggactgctgggaccaaataccatctgaatggaagaaattcattgatgaatcctggccccgctatggcatcccacaaagagggcgaggaccgtttttttcccctgtccgggtccctgatttttggcaaacaaaatgctgccagagacaatgcggattacagcgatgtcatgctcaccagcgaggaagaaatcaaaaccactaaccctgtggctacagaggaatacggtatcgtggcagataacttgcagcagcaaaacacggctcctcaaattggaactgtcaacagccagggggccttacccggtatggtctggcagaaccgggacgtgtacctgcagggtcccatctgggccaagattcctcacacggacggcaacttccacccgtctccgctgatgggcggctttggcctgaaacatcctccgcctcagatcctgatcaagaacacgcctgtacctgcggatcctccgaccaccttcaaccagtcaaagctgaactctttcatcacgcaatacagcaccggacaggtcagcgtggaaattgaatgggagctgcagaaggaaaacagcaagcgctggaaccccgagatccagtacacctccaactactacaaatctacaagtgtggactttgctgttaatacagaaggcgtgtactctgaaccccaccccattggcacccgttacctcacccgtcccctgtaa

SEQ ID NO: 84 - protein, 736 aa, Artificial Sequence
  AAV214AB VP1
MAADGYLPDWLEDNLSEGIREWWALKPGAPKPKANQQKQDDGRGLVLPGYKYLGPFNGLDKGEPVNAADAAALEHDKAYDQQLKAGDNPYLRYNHADAEFQERLQEDTSFGGNLGRAVFQAKKRVLEPFGLVEEGAKTAPGKKRPVEQSPQEPDSSSGIGKTGQQPAKKRLNFGQTGDSESVPDPQPLGEPPATPAAVGPTTMASGGGAPMADNNEGADGVGNASGNWHCDSTWLGDRVITTSTRTWALPTYNNHLYKQISSSTSGGSSNDNAYFGYSTPWGYFDFNRFHCHFSPRDWQRLINNNWGFRPKRLNFKLFNIQVKEVTDNNGVKTIANNLTSTVQVFTDSDYQLPYVLGSAHQGCLPPFPADVFMIPQYGYLTLNDGSQAVGRSSFYCLEYFPSQMLRTGNNFTFSYTFEDVPFHSSYAHSQSLDRLMNPLIDQYLYYLSKTINGSGQNQQTLKFSQGGPNTMANQAKNWLPGPCYRQQRVSTTTGQNNNSNFAWTAGTKYHLNGRNSLMNPGPAMASHKEGEDRFFPLSGSLIFGKQNAARDNADYSDVMLTSEEEIKTTNPVATEEYGIVADNLQQQNTAPQIGTVNSQGALPGMVWQNRDVYLQGPIWAKIPHTDGNFHPSPLMGGFGLKHPPPQILIKNTPVPADPPTTFNQSKLNSFITQYSTGQVSVEIEWELQKENSKRWNPEIQYTSNYYKSTSVDFAVNTEGVYSEPHPIGTRYLTRPL

SEQ ID NO: 85 - protein, 599 aa, Artificial Sequence
  AAV214AB VP2
MAPGKKRPVEQSPQEPDSSSGIGKTGQQPAKKRLNFGQTGDSESVPDPQPLGEPPATPAAVGPTTMASGGGAPMADNNEGADGVGNASGNWHCDSTWLGDRVITTSTRTWALPTYNNHLYKQISSSTSGGSSNDNAYFGYSTPWGYFDFNRFHCHFSPRDWQRLINNNWGFRPKRLNFKLFNIQVKEVTDNNGVKTIANNLTSTVQVFTDSDYQLPYVLGSAHQGCLPPFPADVFMIPQYGYLTLNDGSQAVGRSSFYCLEYFPSQMLRTGNNFTFSYTFEDVPFHSSYAHSQSLDRLMNPLIDQYLYYLSKTINGSGQNQQTLKFSQGGPNTMANQAKNWLPGPCYRQQRVSTTTGQNNNSNFAWTAGTKYHLNGRNSLMNPGPAMASHKEGEDRFFPLSGSLIFGKQNAARDNADYSDVMLTSEEEIKTTNPVATEEYGIVADNLQQQNTAPQIGTVNSQGALPGMVWQNRDVYLQGPIWAKIPHTDGNFHPSPLMGGFGLKHPPPQILIKNTPVPADPPTTFNQSKLNSFITQYSTGQVSVEIEWELQKENSKRWNPEIQYTSNYYKSTSVDFAVNTEGVYSEPHPIGTRYLTRPL

SEQ ID NO: 86 - protein, 534 aa, Artificial Sequence
  AAV214AB VP3
MASGGGAPMADNNEGADGVGNASGNWHCDSTWLGDRVITTSTRTWALPTYNNHLYKQISSSTSGGSSNDNAYFGYSTPWGYFDFNRFHCHFSPRDWQRLINNNWGFRPKRLNFKLFNIQVKEVTDNNGVKTIANNLTSTVQVFTDSDYQLPYVLGSAHQGCLPPFPADVFMIPQYGYLTLNDGSQAVGRSSFYCLEYFPSQMLRTGNNFTFSYTFEDVPFHSSYAHSQSLDRLMNPLIDQYLYYLSKTINGSGQNQQTLKFSQGGPNTMANQAKNWLPGPCYRQQRVSTTTGQNNNSNFAWTAGTKYHLNGRNSLMNPGPAMASHKEGEDRFFPLSGSLIFGKQNAARDNADYSDVMLTSEEEIKTTNPVATEEYGIVADNLQQQNTAPQIGTVNSQGALPGMVWQNRDVYLQGPIWAKIPHTDGNFHPSPLMGGFGLKHPPPQILIKNTPVPADPPTTFNQSKLNSFITQYSTGQVSVEIEWELQKENSKRWNPEIQYTSNYYKSTSVDFAVNTEGVYSEPHPIGTRYLTRPL

SEQ ID NO: 87 - protein, 8 aa, Artificial Sequence
  AAV214AB VR-1 amino acid
SSTSGGSS

SEQ ID NO: 88 - DNA, 6719 bp, Artificial Sequence
  pA-CF1
tcctgcaggcagctgcgcgctcgctcgctcactgaggccgcccgggcaaagcccgggcgtcgggcgacctttggtcgcccggcctcagtgagcgagcgagcgcgcagagagggagtggccaactccatcactaggggttcctgcggccgcatggaggcggtactatgtagatgagaattcaggagcaaactgggaaaagcaactgcttccaaatatttgtgatttttacagtgtagttttggaaaaactcttagcctaccaattcttctaagtgttttaaaatgtgggagccagtacacatgaagttatagagtgttttaatgaggcttaaatatttaccgtaactatgaaatgctacgcatatcatgctgttcaggctccgtggccacgcaactcataccggtagtactcgccaccatgcagagaagccccctggagaaggcctctgtggtgagcaagctgttcttcagctggaccagacccatcctgagaaagggctacagacagagactggagctgtctgacatctaccagatcccctctgtggactctgctgacaacctgtctgagaagctggagagagagtgggacagagagctggccagcaagaagaaccccaagctgatcaatgccctgagaagatgcttcttctggagattcatgttctatggcatcttcctgtacctgggggaggtgaccaaggctgtgcagcccctgctgctgggcagaatcattgccagctatgaccctgacaacaaggaggagagaagcattgccatctacctgggcattggcctgtgcctgctgttcattgtgagaaccctgctgctgcaccctgccatctttggcctgcaccacattggcatgcagatgagaattgccatgttcagcctgatctacaagaagaccctgaagctgagcagcagagtgctggacaagatcagcattggccagctggtgagcctgctgagcaacaacctgaacaagtttgatgagggcctggccctggcccactttgtgtggattgcccccctgcaggtggccctgctgatgggcctgatctgggagctgctgcaggcctctgccttctgtggcctgggcttcctgattgtgctggccctgttccaggctggcctgggcagaatgatgatgaagtacagagaccagagagctggcaagatctctgagagactggtgatcacctctgagatgattgagaacatccagtctgtgaaggcctactgctgggaggaggccatggagaagatgattgagaacctgagacagacagagctgaagctgaccagaaaggctgcctatgtgagatacttcaacagctctgccttcttcttctctggcttctttgtggtgttcctgtctgtgctgccctatgccctgatcaagggcatcatcctgagaaagatcttcaccaccatcagcttctgcattgtgctgagaatggctgtgaccagacagttcccctgggctgtgcagacctggtatgacagcctgggggccatcaacaagatccaggacttcctgcagaagcaggagtacaagaccctggagtacaacctgaccaccacagaggtggtgatggagaatgtgacagccttctgggaggagggctttggggagctgtttgagaaggccaagcagaacaacaacaacagaaagaccagcaatggggatgacagcctgttcttcagcaacttcagcctgctgggcacccctgtgctgaaggacatcaacttcaagattgagagaggccagctgctggctgtggctggcagcacaggggctggcaagaccagcctgctgatgatgatcatgggggagctggagccctctgagggcaagatcaagcactctggcagaatcagcttctgcagccagttcagctggatcatgcctggcaccatcaaggagaacatcatctttggggtgagctatgatgagtacagatacagatctgtgatcaaggcctgccagctggaggaggacatcagcaagtttgctgagaaggacaacattgtgctgggggaggggggcatcaccctgtctgggggccagagagccagaatcagcctggccagagctgtgtacaaggatgctgacctgtacctgctggacagcccctttggctacctggatgtgctgacagagaaggagatctttgagagctgtgtgtgcaagctgatggccaacaagaccagaatcctggtgaccagcaagatggagcacctgaagaaggctgacaagatcctgatcctgcatgagggcagcagctacttctatggcaccttctctgagctgcagaacctgcagcctgacttcagcagcaagctgatgggctgtgacagctttgaccagttctctgctgagagaagaaacagcatcctgacagagaccctgcacagattcagcctggagggggatgcccctgtgagctggacagagaccaagaagcagagcttcaagcagacaggggagtttggggagaagagaaagaacagcatcctgaaccccatcaacagcaccctgcaggccagaagaagacagtctgtgctgaacctgatgacccactctgtgaaccagggccagaacatccacagaaagaccacagccagcaccagaaaggtgagcctggccccccaggccaacctgacagagctggacatctacagcagaagactgagccaggagacaggcctggagatctctgaggagatcaatgaggaggacctgaaggagtgcttctttgatgacatggagagcatccctgctgtgaccacctggaacacctacctgagatacatcacagtgcacaagagcctgatctttgtgctgatctggtgcctggtgatcttcctggctgaggtggctgccagcctggtggtgctgtggctgctgggcaacacccccctgcaggacaagggcaacagcacccacagcagaaacaacagctatgctgtgatcatcaccagcaccagcagctactatgtgttctacatctatgtgggggtggctgacaccctgctggccatgggcttcttcagaggcctgcccctggtgcacaccctgatcacagtgagcaagatcctgcaccacaagatgctgcactctgtgctgcaggcccccatgagcaccctgaacaccctgaaggctgggggcatcctgaacagattcagcaaggacattgccatcctggatgacctgctgcccctgaccatctttgacttcatccagctgctgctgattgtgattggggccattgctgtggtggctgtgctgcagccctacatctttgtggccacagtgcctgtgattgtggccttcatcatgctgagagcctacttcctgcagaccagccagcagctgaagcagctggagtctgagggcagaagccccatcttcacccacctggtgaccagcctgaagggcctgtggaccctgagagcctttggcagacagccctactttgagaccctgttccacaaggccctgaacctgcacacagccaactggttcctgtacctgagcaccctgagatggttccagatgagaattgagatgatctttgtgatcttcttcattgctgtgaccttcatcagcatcctgaccacaggggagggggagggcagagtgggcatcatcctgaccctggccatgaacatcatgagcaccctgcagtgggctgtgaacagcagcattgatgtggacagcctgatgagatctgtgagcagagtgttcaagttcattgacatgcccacagagggcaagcccaccaagagcaccaagccctacaagaatggccagctgagcaaggtgatgatcattgagaacagccatgtgaagaaggatgacatctggccctctgggggccagatgacagtgaaggacctgacagccaagtacacagaggggggcaatgccatcctggagaacatcagcttcagcatcagccctggccagagagtgggcctgctgggcagaacaggctctggcaagagcaccctgctgtctgccttcctgagactgctgaacacagagggggagatccagattgatggggtgagctgggacagcatcaccctgcagcagtggagaaaggcctttggggtgatcccccagaaggtgttcatcttctctggcaccttcagaaagaacctggacccctatgagcagtggtctgaccaggagatctggaaggtggctgatgaggtgggcctgagatctgtgattgagcagttccctggcaagctggactttgtgctggtggatgggggctgtgtgctgagccatggccacaagcagctgatgtgcctggccagatctgtgctgagcaaggccaagatcctgctgctggatgagccctctgcccacctggaccctgtgacctaccagatcatcagaagaaccctgaagcaggcctttgctgactgcacagtgatcctgtgtgagcacagaattgaggccatgctggagtgccagcagttcctggtgattgaggagaacaaggtgagacagtatgacagcatccagaagctgctgaatgagagaagcctgttcagacaggccatcagcccctctgacagagtgaagctgttcccccacagaaacagcagcaagtgcaagagcaagccccagattgctgccctgaaggaggagaccgaggaggaggtgcaggacaccagactgtaaataaaatacgaaatggatctgaggaacccctagtgatggagttggccactccctctctgcgcgctcgctcgctcactgaggccgggcgaccaaaggtcgcccgacgcccgggctttgcccgggcggcctcagtgagcgagcgagcgcgcagagagggagtggccaattaattaaggcgatgaacggtaatcgtaaaactagcatgtcaatcatatgtaccccggttgataatcagaaaagccccaaaaacaggaagattgtataagcattaattaatttaaatacatggacatgtcagaattggttaattggttgtaacactgacccctatttgtttatttttctaaatacattcaaatatgtatccgctcatgagacaataaccctgataaatgcttcaataatattgaaaaaggaagaatatgagccatattcaacgggaaacgtcgaggccgcgattaaattccaacatggatgctgatttatatgggtataaatgggctcgcgataatgtcgggcaatcaggtgcgacaatctatcgcttgtatgggaagcccgatgcgccagagttgtttctgaaacatggcaaaggtagcgttgccaatgatgttacagatgagatggtcagactaaactggctgacggaatttatgccacttccgaccatcaagcattttatccgtactcctgatgatgcatggttactcaccactgcgatccccggaaaaacagcgttccaggtattagaagaatatcctgattcaggtgaaaatattgttgatgcgctggcagtgttcctgcgccggttgcactcgattcctgtttgtaattgtccttttaacagcgatcgcgtatttcgcctcgctcaggcgcaatcacgaatgaataacggtttggttgatgcgagtgattttgatgacgagcgtaatggctggcctgttgaacaagtctggaaagaaatgcataaacttttgccattctcaccggattcagtcgtcactcatggtgatttctcacttgataaccttatttttgacgaggggaaattaataggttgtattgatgttggacgagtcggaatcgcagaccgataccaggatcttgccatcctatggaactgcctcggtgagttttctccttcattacagaaacggctttttcaaaaatatggtattgataatcctgatatgaataaattgcagtttcatttgatgctcgatgagtttttctaaaagcagagcattacgctgacttgacgggacggcgcaagctcatgaccaaaatcccttaacgtgagttacgcgcgcgtcgttccactgagcgtcagaccccgtagaaaagatcaaaggatcttcttgagatcctttttttctgcgcgtaatctgctgcttgcaaacaaaaaaaccaccgctaccagcggtggtttgtttgccggatcaagagctaccaactctttttccgaaggtaactggcttcagcagagcgcagataccaaatactgttcttctagtgtagccgtagttagcccaccacttcaagaactctgtagcaccgcctacatacctcgctctgctaatcctgttaccagtggctgctgccagtggcgataagtcgtgtcttaccgggttggactcaagacgatagttaccggataaggcgcagcggtcgggctgaacggggggttcgtgcacacagcccagcttggagcgaacgacctacaccgaactgagatacctacagcgtgagctatgagaaagcgccacgcttcccgaagggagaaaggcggacaggtatccggtaagcggcagggtcggaacaggagagcgcacgagggagcttccagggggaaacgcctggtatctttatagtcctgtcgggtttcgccacctctgacttgagcgtcgatttttgtgatgctcgtcaggggggcggagcctatggaaaaacgccagcaacgcggcctttttacggttcctggccttttgctggccttttgctcacatgtttaaaccatg

SEQ ID NO: 89 - DNA, 6751 bp, Artificial Sequence
  pA-CF3
tcctgcaggcagctgcgcgctcgctcgctcactgaggccgcccgggcaaagcccgggcgtcgggcgacctttggtcgcccggcctcagtgagcgagcgagcgcgcagagagggagtggccaactccatcactaggggttcctgcggccgcatggaggcggtactatgtagatgagaattcaggagcaaactgggaaaagcaactgcttccaaatatttgtgatttttacagtgtagttttggaaaaactcttagcctaccaattcttctaagtgttttaaaatgtgggagccagtacacatgaagttatagagtgttttaatgaggcttaaatatttaccgtaactatgaaatgctacgcatatcatgctgttcaggctccgtggccacgcaactcataccggtagtactcgccaccatgcagagaagccccctggagaaggcctctgtggtgagcaagctgttcttcagctggaccagacccatcctgagaaagggctacagacagagactggagctgtctgacatctaccagatcccctctgtggactctgctgacaacctgtctgagaagctggagagagagtgggacagagagctggccagcaagaagaaccccaagctgatcaatgccctgagaagatgcttcttctggagattcatgttctatggcatcttcctgtacctgggggaggtgaccaaggctgtgcagcccctgctgctgggcagaatcattgccagctatgaccctgacaacaaggaggagagaagcattgccatctacctgggcattggcctgtgcctgctgttcattgtgagaaccctgctgctgcaccctgccatctttggcctgcaccacattggcatgcagatgagaattgccatgttcagcctgatctacaagaagaccctgaagctgagcagcagagtgctggacaagatcagcattggccagctggtgagcctgctgagcaacaacctgaacaagtttgatgagggcctggccctggcccactttgtgtggattgcccccctgcaggtggccctgctgatgggcctgatctgggagctgctgcaggcctctgccttctgtggcctgggcttcctgattgtgctggccctgttccaggctggcctgggcagaatgatgatgaagtacagagaccagagagctggcaagatctctgagagactggtgatcacctctgagatgattgagaacatccagtctgtgaaggcctactgctgggaggaggccatggagaagatgattgagaacctgagacagacagagctgaagctgaccagaaaggctgcctatgtgagatacttcaacagctctgccttcttcttctctggcttctttgtggtgttcctgtctgtgctgccctatgccctgatcaagggcatcatcctgagaaagatcttcaccaccatcagcttctgcattgtgctgagaatggctgtgaccagacagttcccctgggctgtgcagacctggtatgacagcctgggggccatcaacaagatccaggacttcctgcagaagcaggagtacaagaccctggagtacaacctgaccaccacagaggtggtgatggagaatgtgacagccttctgggaggagggctttggggagctgtttgagaaggccaagcagaacaacaacaacagaaagaccagcaatggggatgacagcctgttcttcagcaacttcagcctgctgggcacccctgtgctgaaggacatcaacttcaagattgagagaggccagctgctggctgtggctggcagcacaggggctggcaagaccagcctgctgatgatgatcatgggggagctggagccctctgagggcaagatcaagcactctggcagaatcagcttctgcagccagttcagctggatcatgcctggcaccatcaaggagaacatcatctttggggtgagctatgatgagtacagatacagatctgtgatcaaggcctgccagctggaggaggacatcagcaagtttgctgagaaggacaacattgtgctgggggaggggggcatcaccctgtctgggggccagagagccagaatcagcctggccagagctgtgtacaaggatgctgacctgtacctgctggacagcccctttggctacctggatgtgctgacagagaaggagatctttgagagctgtgtgtgcaagctgatggccaacaagaccagaatcctggtgaccagcaagatggagcacctgaagaaggctgacaagatcctgatcctgcatgagggcagcagctacttctatggcaccttctctgagctgcagaacctgcagcctgacttcagcagcaagctgatgggctgtgacagctttgaccagttctctgctgagagaagaaacagcatcctgacagagaccctgcacagattcagcctggagggggatgcccctgtgagctggacagagaccaagaagcagagcttcaagcagacaggggagtttggggagaagagaaagaacagcatcctgaaccccatcaacagcaccctgcaggccagaagaagacagtctgtgctgaacctgatgacccactctgtgaaccagggccagaacatccacagaaagaccacagccagcaccagaaaggtgagcctggccccccaggccaacctgacagagctggacatctacagcagaagactgagccaggagacaggcctggagatctctgaggagatcaatgaggaggacctgaaggagtgcttctttgatgacatggagagcatccctgctgtgaccacctggaacacctacctgagatacatcacagtgcacaagagcctgatctttgtgctgatctggtgcctggtgatcttcctggctgaggtggctgccagcctggtggtgctgtggctgctgggcaacacccccctgcaggacaagggcaacagcacccacagcagaaacaacagctatgctgtgatcatcaccagcaccagcagctactatgtgttctacatctatgtgggggtggctgacaccctgctggccatgggcttcttcagaggcctgcccctggtgcacaccctgatcacagtgagcaagatcctgcaccacaagatgctgcactctgtgctgcaggcccccatgagcaccctgaacaccctgaaggctgggggcatcctgaacagattcagcaaggacattgccatcctggatgacctgctgcccctgaccatctttgacttcatccagctgctgctgattgtgattggggccattgctgtggtggctgtgctgcagccctacatctttgtggccacagtgcctgtgattgtggccttcatcatgctgagagcctacttcctgcagaccagccagcagctgaagcagctggagtctgagggcagaagccccatcttcacccacctggtgaccagcctgaagggcctgtggaccctgagagcctttggcagacagccctactttgagaccctgttccacaaggccctgaacctgcacacagccaactggttcctgtacctgagcaccctgagatggttccagatgagaattgagatgatctttgtgatcttcttcattgctgtgaccttcatcagcatcctgaccacaggggagggggagggcagagtgggcatcatcctgaccctggccatgaacatcatgagcaccctgcagtgggctgtgaacagcagcattgatgtggacagcctgatgagatctgtgagcagagtgttcaagttcattgacatgcccacagagggcaagcccaccaagagcaccaagccctacaagaatggccagctgagcaaggtgatgatcattgagaacagccatgtgaagaaggatgacatctggccctctgggggccagatgacagtgaaggacctgacagccaagtacacagaggggggcaatgccatcctggagaacatcagcttcagcatcagccctggccagagagtgggcctgctgggcagaacaggctctggcaagagcaccctgctgtctgccttcctgagactgctgaacacagagggggagatccagattgatggggtgagctgggacagcatcaccctgcagcagtggagaaaggcctttggggtgatcccccagaaggtgttcatcttctctggcaccttcagaaagaacctggacccctatgagcagtggtctgaccaggagatctggaaggtggctgatgaggtgggcctgagatctgtgattgagcagttccctggcaagctggactttgtgctggtggatgggggctgtgtgctgagccatggccacaagcagctgatgtgcctggccagatctgtgctgagcaaggccaagatcctgctgctggatgagccctctgcccacctggaccctgtgacctaccagatcatcagaagaaccctgaagcaggcctttgctgactgcacagtgatcctgtgtgagcacagaattgaggccatgctggagtgccagcagttcctggtgattgaggagaacaaggtgagacagtatgacagcatccagaagctgctgaatgagagaagcctgttcagacaggccatcagcccctctgacagagtgaagctgttcccccacagaaacagcagcaagtgcaagagcaagccccagattgctgccctgaaggaggagaccgaggaggaggtgcaggacaccagactgtaaataaatatctttattttcattacatctgtgtgttggttttttgtgtggatctgaggaacccctagtgatggagttggccactccctctctgcgcgctcgctcgctcactgaggccgggcgaccaaaggtcgcccgacgcccgggctttgcccgggcggcctcagtgagcgagcgagcgcgcagagagggagtggccaattaattaaggcgatgaacggtaatcgtaaaactagcatgtcaatcatatgtaccccggttgataatcagaaaagccccaaaaacaggaagattgtataagcattaattaatttaaatacatggacatgtcagaattggttaattggttgtaacactgacccctatttgtttatttttctaaatacattcaaatatgtatccgctcatgagacaataaccctgataaatgcttcaataatattgaaaaaggaagaatatgagccatattcaacgggaaacgtcgaggccgcgattaaattccaacatggatgctgatttatatgggtataaatgggctcgcgataatgtcgggcaatcaggtgcgacaatctatcgcttgtatgggaagcccgatgcgccagagttgtttctgaaacatggcaaaggtagcgttgccaatgatgttacagatgagatggtcagactaaactggctgacggaatttatgccacttccgaccatcaagcattttatccgtactcctgatgatgcatggttactcaccactgcgatccccggaaaaacagcgttccaggtattagaagaatatcctgattcaggtgaaaatattgttgatgcgctggcagtgttcctgcgccggttgcactcgattcctgtttgtaattgtccttttaacagcgatcgcgtatttcgcctcgctcaggcgcaatcacgaatgaataacggtttggttgatgcgagtgattttgatgacgagcgtaatggctggcctgttgaacaagtctggaaagaaatgcataaacttttgccattctcaccggattcagtcgtcactcatggtgatttctcacttgataaccttatttttgacgaggggaaattaataggttgtattgatgttggacgagtcggaatcgcagaccgataccaggatcttgccatcctatggaactgcctcggtgagttttctccttcattacagaaacggctttttcaaaaatatggtattgataatcctgatatgaataaattgcagtttcatttgatgctcgatgagtttttctaaaagcagagcattacgctgacttgacgggacggcgcaagctcatgaccaaaatcccttaacgtgagttacgcgcgcgtcgttccactgagcgtcagaccccgtagaaaagatcaaaggatcttcttgagatcctttttttctgcgcgtaatctgctgcttgcaaacaaaaaaaccaccgctaccagcggtggtttgtttgccggatcaagagctaccaactctttttccgaaggtaactggcttcagcagagcgcagataccaaatactgttcttctagtgtagccgtagttagcccaccacttcaagaactctgtagcaccgcctacatacctcgctctgctaatcctgttaccagtggctgctgccagtggcgataagtcgtgtcttaccgggttggactcaagacgatagttaccggataaggcgcagcggtcgggctgaacggggggttcgtgcacacagcccagcttggagcgaacgacctacaccgaactgagatacctacagcgtgagctatgagaaagcgccacgcttcccgaagggagaaaggcggacaggtatccggtaagcggcagggtcggaacaggagagcgcacgagggagcttccagggggaaacgcctggtatctttatagtcctgtcgggtttcgccacctctgacttgagcgtcgatttttgtgatgctcgtcaggggggcggagcctatggaaaaacgccagcaacgcggcctttttacggttcctggccttttgctggccttttgctcacatgtttaaaccatg

SEQ ID NO: 90 - DNA, 6603 bp, Artificial Sequence
  pA-CF5
tcctgcaggcagctgcgcgctcgctcgctcactgaggccgcccgggcaaagcccgggcgtcgggcgacctttggtcgcccggcctcagtgagcgagcgagcgcgcagagagggagtggccaactccatcactaggggttcctgcggccgcaatatttgcatgtcgctatgtgttctgggaaatcaccataaacgtgaaatgtctttggatttgggaatcttcgaagttctgtatgagaccacagatctccaccggtagtactcgccaccatgcagagaagccccctggagaaggcctctgtggtgagcaagctgttcttcagctggaccagacccatcctgagaaagggctacagacagagactggagctgtctgacatctaccagatcccctctgtggactctgctgacaacctgtctgagaagctggagagagagtgggacagagagctggccagcaagaagaaccccaagctgatcaatgccctgagaagatgcttcttctggagattcatgttctatggcatcttcctgtacctgggggaggtgaccaaggctgtgcagcccctgctgctgggcagaatcattgccagctatgaccctgacaacaaggaggagagaagcattgccatctacctgggcattggcctgtgcctgctgttcattgtgagaaccctgctgctgcaccctgccatctttggcctgcaccacattggcatgcagatgagaattgccatgttcagcctgatctacaagaagaccctgaagctgagcagcagagtgctggacaagatcagcattggccagctggtgagcctgctgagcaacaacctgaacaagtttgatgagggcctggccctggcccactttgtgtggattgcccccctgcaggtggccctgctgatgggcctgatctgggagctgctgcaggcctctgccttctgtggcctgggcttcctgattgtgctggccctgttccaggctggcctgggcagaatgatgatgaagtacagagaccagagagctggcaagatctctgagagactggtgatcacctctgagatgattgagaacatccagtctgtgaaggcctactgctgggaggaggccatggagaagatgattgagaacctgagacagacagagctgaagctgaccagaaaggctgcctatgtgagatacttcaacagctctgccttcttcttctctggcttctttgtggtgttcctgtctgtgctgccctatgccctgatcaagggcatcatcctgagaaagatcttcaccaccatcagcttctgcattgtgctgagaatggctgtgaccagacagttcccctgggctgtgcagacctggtatgacagcctgggggccatcaacaagatccaggacttcctgcagaagcaggagtacaagaccctggagtacaacctgaccaccacagaggtggtgatggagaatgtgacagccttctgggaggagggctttggggagctgtttgagaaggccaagcagaacaacaacaacagaaagaccagcaatggggatgacagcctgttcttcagcaacttcagcctgctgggcacccctgtgctgaaggacatcaacttcaagattgagagaggccagctgctggctgtggctggcagcacaggggctggcaagaccagcctgctgatgatgatcatgggggagctggagccctctgagggcaagatcaagcactctggcagaatcagcttctgcagccagttcagctggatcatgcctggcaccatcaaggagaacatcatctttggggtgagctatgatgagtacagatacagatctgtgatcaaggcctgccagctggaggaggacatcagcaagtttgctgagaaggacaacattgtgctgggggaggggggcatcaccctgtctgggggccagagagccagaatcagcctggccagagctgtgtacaaggatgctgacctgtacctgctggacagcccctttggctacctggatgtgctgacagagaaggagatctttgagagctgtgtgtgcaagctgatggccaacaagaccagaatcctggtgaccagcaagatggagcacctgaagaaggctgacaagatcctgatcctgcatgagggcagcagctacttctatggcaccttctctgagctgcagaacctgcagcctgacttcagcagcaagctgatgggctgtgacagctttgaccagttctctgctgagagaagaaacagcatcctgacagagaccctgcacagattcagcctggagggggatgcccctgtgagctggacagagaccaagaagcagagcttcaagcagacaggggagtttggggagaagagaaagaacagcatcctgaaccccatcaacagcaccctgcaggccagaagaagacagtctgtgctgaacctgatgacccactctgtgaaccagggccagaacatccacagaaagaccacagccagcaccagaaaggtgagcctggccccccaggccaacctgacagagctggacatctacagcagaagactgagccaggagacaggcctggagatctctgaggagatcaatgaggaggacctgaaggagtgcttctttgatgacatggagagcatccctgctgtgaccacctggaacacctacctgagatacatcacagtgcacaagagcctgatctttgtgctgatctggtgcctggtgatcttcctggctgaggtggctgccagcctggtggtgctgtggctgctgggcaacacccccctgcaggacaagggcaacagcacccacagcagaaacaacagctatgctgtgatcatcaccagcaccagcagctactatgtgttctacatctatgtgggggtggctgacaccctgctggccatgggcttcttcagaggcctgcccctggtgcacaccctgatcacagtgagcaagatcctgcaccacaagatgctgcactctgtgctgcaggcccccatgagcaccctgaacaccctgaaggctgggggcatcctgaacagattcagcaaggacattgccatcctggatgacctgctgcccctgaccatctttgacttcatccagctgctgctgattgtgattggggccattgctgtggtggctgtgctgcagccctacatctttgtggccacagtgcctgtgattgtggccttcatcatgctgagagcctacttcctgcagaccagccagcagctgaagcagctggagtctgagggcagaagccccatcttcacccacctggtgaccagcctgaagggcctgtggaccctgagagcctttggcagacagccctactttgagaccctgttccacaaggccctgaacctgcacacagccaactggttcctgtacctgagcaccctgagatggttccagatgagaattgagatgatctttgtgatcttcttcattgctgtgaccttcatcagcatcctgaccacaggggagggggagggcagagtgggcatcatcctgaccctggccatgaacatcatgagcaccctgcagtgggctgtgaacagcagcattgatgtggacagcctgatgagatctgtgagcagagtgttcaagttcattgacatgcccacagagggcaagcccaccaagagcaccaagccctacaagaatggccagctgagcaaggtgatgatcattgagaacagccatgtgaagaaggatgacatctggccctctgggggccagatgacagtgaaggacctgacagccaagtacacagaggggggcaatgccatcctggagaacatcagcttcagcatcagccctggccagagagtgggcctgctgggcagaacaggctctggcaagagcaccctgctgtctgccttcctgagactgctgaacacagagggggagatccagattgatggggtgagctgggacagcatcaccctgcagcagtggagaaaggcctttggggtgatcccccagaaggtgttcatcttctctggcaccttcagaaagaacctggacccctatgagcagtggtctgaccaggagatctggaaggtggctgatgaggtgggcctgagatctgtgattgagcagttccctggcaagctggactttgtgctggtggatgggggctgtgtgctgagccatggccacaagcagctgatgtgcctggccagatctgtgctgagcaaggccaagatcctgctgctggatgagccctctgcccacctggaccctgtgacctaccagatcatcagaagaaccctgaagcaggcctttgctgactgcacagtgatcctgtgtgagcacagaattgaggccatgctggagtgccagcagttcctggtgattgaggagaacaaggtgagacagtatgacagcatccagaagctgctgaatgagagaagcctgttcagacaggccatcagcccctctgacagagtgaagctgttcccccacagaaacagcagcaagtgcaagagcaagccccagattgctgccctgaaggaggagaccgaggaggaggtgcaggacaccagactgtaaataaatatctttattttcattacatctgtgtgttggttttttgtgtggatctgaggaacccctagtgatggagttggccactccctctctgcgcgctcgctcgctcactgaggccgggcgaccaaaggtcgcccgacgcccgggctttgcccgggcggcctcagtgagcgagcgagcgcgcagagagggagtggccaattaattaaggcgatgaacggtaatcgtaaaactagcatgtcaatcatatgtaccccggttgataatcagaaaagccccaaaaacaggaagattgtataagcattaattaatttaaatacatggacatgtcagaattggttaattggttgtaacactgacccctatttgtttatttttctaaatacattcaaatatgtatccgctcatgagacaataaccctgataaatgcttcaataatattgaaaaaggaagaatatgagccatattcaacgggaaacgtcgaggccgcgattaaattccaacatggatgctgatttatatgggtataaatgggctcgcgataatgtcgggcaatcaggtgcgacaatctatcgcttgtatgggaagcccgatgcgccagagttgtttctgaaacatggcaaaggtagcgttgccaatgatgttacagatgagatggtcagactaaactggctgacggaatttatgccacttccgaccatcaagcattttatccgtactcctgatgatgcatggttactcaccactgcgatccccggaaaaacagcgttccaggtattagaagaatatcctgattcaggtgaaaatattgttgatgcgctggcagtgttcctgcgccggttgcactcgattcctgtttgtaattgtccttttaacagcgatcgcgtatttcgcctcgctcaggcgcaatcacgaatgaataacggtttggttgatgcgagtgattttgatgacgagcgtaatggctggcctgttgaacaagtctggaaagaaatgcataaacttttgccattctcaccggattcagtcgtcactcatggtgatttctcacttgataaccttatttttgacgaggggaaattaataggttgtattgatgttggacgagtcggaatcgcagaccgataccaggatcttgccatcctatggaactgcctcggtgagttttctccttcattacagaaacggctttttcaaaaatatggtattgataatcctgatatgaataaattgcagtttcatttgatgctcgatgagtttttctaaaagcagagcattacgctgacttgacgggacggcgcaagctcatgaccaaaatcccttaacgtgagttacgcgcgcgtcgttccactgagcgtcagaccccgtagaaaagatcaaaggatcttcttgagatcctttttttctgcgcgtaatctgctgcttgcaaacaaaaaaaccaccgctaccagcggtggtttgtttgccggatcaagagctaccaactctttttccgaaggtaactggcttcagcagagcgcagataccaaatactgttcttctagtgtagccgtagttagcccaccacttcaagaactctgtagcaccgcctacatacctcgctctgctaatcctgttaccagtggctgctgccagtggcgataagtcgtgtcttaccgggttggactcaagacgatagttaccggataaggcgcagcggtcgggctgaacggggggttcgtgcacacagcccagcttggagcgaacgacctacaccgaactgagatacctacagcgtgagctatgagaaagcgccacgcttcccgaagggagaaaggcggacaggtatccggtaagcggcagggtcggaacaggagagcgcacgagggagcttccagggggaaacgcctggtatctttatagtcctgtcgggtttcgccacctctgacttgagcgtcgatttttgtgatgctcgtcaggggggcggagcctatggaaaaacgccagcaacgcggcctttttacggttcctggccttttgctggccttttgctcacatgtttaaaccatg

SEQ ID NO: 91 - DNA, 7519 bp, Artificial Sequence
  pA-CF7
tcctgcaggcagctgcgcgctcgctcgctcactgaggccgcccgggcaaagcccgggcgtcgggcgacctttggtcgcccggcctcagtgagcgagcgagcgcgcagagagggagtggccaactccatcactaggggttcctgcggccgcaatatttgcatgtcgctatgtgttctgggaaatcaccataaacgtgaaatgtctttggatttgggaatcttcgaagttctgtatgagaccacagatctccaccggtagtactcgccaccatgcagagaagccccctggagaaggcctctgtggtgagcaagctgttcttcccccctggagaaggcctctgtggtgagcaagctgttcttcagctggaccagacccatcctgagaaagggctacagacagagactggagctgtctgacatctaccagatcccctctgtggactctgctgacaacctgtctgagaagctggagagagagtgggacagagagctggccagcaagaagaaccccaagctgatcaatgccctgagaagatgcttcttctggagattcatgttctatggcatcttcctgtacctgggggaggtgaccaaggctgtgcagcccctgctgctgggcagaatcattgccagctatgacccagcccctgctgctgggcagaatcattgccagctatgaccctgacaacaaggaggagagaagcattgccatctacctgggcattggcctgtgcctgctgttcattgtgagaaccctgctgctgcaccctgccatctttggcctgcaccacattggcatgcagatgagaattgccatgttcagcctgatctacaagaagaccctgaagctgagcagcagagtgctggacaagatcagcattggccagctggtgagcctgctgagcaacaacctgaacaagtttgatgagggcctggccctggcccactttgtgtggattgcttgatgagggcctggccctggcccactttgtgtggattgcccccctgcaggtggccctgctgatgggcctgatctgggagctgctgcaggcctctgccttctgtggcctgggcttcctgattgtgctggccctgttccaggctggcctgggcagaatgatgatgaagtacagagaccagagagctggcaagatctctgagagactggtgatcacctctgagatgattgagaacatccagtctgtgaaggcctactgctgggaggaggccatggagaagatgattgagaacctgagacagacagagctgaagctgaccagaaaggctgcctatgtgagatacttcaacagctctgccttcttcttctctggcttctttgtggtgttcctgtctgtgctgcctctgccttcttcttctctggcttctttgtggtgttcctgtctgtgctgccctatgccctgatcaagggcatcatcctgagaaagatcttcaccaccatcagcttctgcattgtgctgagaatggctgtgaccagacagttcccctgggctgtgcagacctggtatgacagcctgggggccatcaacaagatccaggacttcctgcagaagcaggagtacaagaccctggagtacaacctgaccaccacagaggtggtgatggagaatgtgacagccttctgggaggagggctttggggagctgtttgagaaggccaagcagaacaacaacaacagaaagaccagcaatggggatgacagcctgttcttcagcaacttcagcctgctgggcacccctgtgcggatgacagcctgttcttcagcaacttcagcctgctgggcacccctgtgctgaaggacatcaacttcaagattgagagaggccagctgctggctgtggctggcagcacaggggctggcaagaccagcctgctgatgatgatcatgggggagctggagccctctgagggcaagatcaagcactctggcagaatcagcttctgcagccagttcagctggatcatgcctggcaccatcaaggagaacatcatctttggggtgagctatgatgagtacagatacagatctgtgatcaaggcctgccagctggaggaggacatcaagatctgtgatcaaggcctgccagctggaggaggacatcagcaagtttgctgagaaggacaacattgtgctgggggaggggggcatcaccctgtctgggggccagagagccagaatcagcctggccagagctgtgtacaaggatgctgacctgtacctgctggacagcccctttggctacctggatgtgctgacagagaaggagatctttgagagctgtgtgtgcaagctgatggccaacaagaccagaatcctggtgaccagcaagatggagcacctgaagaaggctgacaagatcctgatcctgcatgagggcagcagagaaggctgacaagatcctgatcctgcatgagggcagcagctacttctatggcaccttctctgagctgcagaacctgcagcctgacttcagcagcaagctgatgggctgtgacagctttgaccagttctctgctgagagaagaaacagcatcctgacagagaccctgcacagattcagcctggagggggatgcccctgtgagctggacagagaccaagaagcagagcttcaagcagacaggggagtttggggagaagagaaagaacagcatcctgaaccccatcaacagcatcagaaagttcagcattgtgcagaagacccatcaacagcatcagaaagttcagcattgtgcagaagacccccctgcagatgaatggcattgaggaggactctgatgagcccctggagagaagactgagcctggtgcctgactctgagcagggggaggccatcctgcccagaatctctgtgatcagcacaggccccaccctgcaggccagaagaagacagtctgtgctgaacctgatgacccactctgtgaaccagggccagaacatccaccactctgtgaaccagggccagaacatccacagaaagaccacagccagcaccagaaaggtgagcctggccccccaggccaacctgacagagctggacatctacagcagaagactgagccaggagacaggcctggagatctctgaggagatcaatgaggaggacctgaaggagtgcttctttgatgacatggagagcatccctgctgtgaccacctggaacacctacctgagatacatcacagtgcacaagagcctgatctttgtgctgatctggtgcctggtgatcttcctggctgaggtggctgccagcctggtggtgcgtgatcttcctggctgaggtggctgccagcctggtggtgctgtggctgctgggcaacacccccctgcaggacaagggcaacagcacccacagcagaaacaacagctatgctgtgatcatcaccagcaccagcagctactatgtgttctacatctatgtgggggtggctgacaccctgctggccatgggcttcttcagaggcctgcccctggtgcacaccctgatcacagtgagcaagatcctgcaccacaagatgctgcactctgtgctgcaggcccccatgagcaccctgaacaccctgaaggctgggggcatcctgaatgagcaccctgaacaccctgaaggctgggggcatcctgaacagattcagcaaggacattgccatcctggatgacctgctgcccctgaccatctttgacttcatccagctgctgctgattgtgattggggccattgctgtggtggctgtgctgcagccctacatctttgtggccacagtgcctgtgattgtggccttcatcatgctgagagcctacttcctgcagaccagccagcagctgaagcagctggagtctgagggcagaagccccatcttcacccacctggtgaccagcctgaagggcctgtggaccctgagagcccctggtgaccagcctgaagggcctgtggaccctgagagcctttggcagacagccctactttgagaccctgttccacaaggccctgaacctgcacacagccaactggttcctgtacctgagcaccctgagatggttccagatgagaattgagatgatctttgtgatcttcttcattgctgtgaccttcatcagcatcctgaccacaggggagggggagggcagagtgggcatcatcctgaccctggccatgaacatcatgagcaccctgcagtgggctgtgaacagcagcattgatgtggacagcctgatgagatctgtgagcagagtgttcaagttcattgacatgcccacagagggcaagcccaccaagagcaccaagccctacaagaatggccagctgcagagggcaagcccaccaagagcaccaagccctacaagaatggccagctgagcaaggtgatgatcattgagaacagccatgtgaagaaggatgacatctggccctctgggggccagatgacagtgaaggacctgacagccaagtacacagaggggggcaatgccatcctggagaacatcagcttcagcatcagccctggccagagagtgggcctgctgggcagaacaggctctggcaagagcaccctgctgtctgccttcctgagactgctgaacacagagggggagatccagattgatggggtgagctgggacagcatcaccctgcagcagtggagaaaggcctttggggtgatcccccagaaggtgttcatcttctctggcaccttcagaaagaacctgtgatcccccagaaggtgttcatcttctctggcaccttcagaaagaacctggacccctatgagcagtggtctgaccaggagatctggaaggtggctgatgaggtgggcctgagatctgtgattgagcagttccctggcaagctggactttgtgctggtggatgggggctgtgtgctgagccatggccacaagcagctgatgtgcctggccagatctgtgctgagcaaggccaagatcctgctgctggatgagccctctgcccacctggaccctgtgacctaccagatcatcagaagaaccctgaagcaggcctttgctgaaccagatcatcagaagaaccctgaagcaggcctttgctgactgcacagtgatcctgtgtgagcacagaattgaggccatgctggagtgccagcagttcctggtgattgaggagaacaaggtgagacagtatgacagcatccagaagctgctgaatgagagaagcctgttcagacaggccatcagcccctctgacagagtgaagctgttcccccacagaaacagcagcaagtgcaagagcaagccccagattgctgccctgaaggaggagaccgaggaggaggtgcaggacaccagactgtaaataaatatctttattttcattacatctgtgtgttggttttttgtgtggatctgaggaacccctagtgatggagttggccactccctctctgcgcgctcatctgaggaacccctagtgatggagttggccactccctctctgcgcgctcgctcgctcactgaggccgggcgaccaaaggtcgcccgacgcccgggctttgcccgggcggcctcagtgagcgagcgagcgcgcagagagggagtggccaattaattaaggcgatgaacggtaatcgtaaaactagcatgtcaatcatatgtaccccggttgataatcagaaaagccccaaaaacaggaagattgtataagcattaattaatttaaatacatggacatgtcagaattggttaattggttgtaacactgacccctatttgtttatttttctaaatacattcaaatatgtatccgctcatgagacaataaccctgataaatgcttcaataatattgaaaaaggaagaatatgagccatattcaacgggaaacgtcgaggccgcgattaaattccaacatggatgctgatttatatgggtataaatgggctcgcgataatgtcgggcaatcaggtgcgacaatctatcgcttgtatgggaagcccgatgcgccagagttgtttcgataatgtcgggcaatcaggtgcgacaatctatcgcttgtatgggaagcccgatgcgccagagttgtttctgaaacatggcaaaggtagcgttgccaatgatgttacagatgagatggtcagactaaactggctgacggaatttatgccacttccgaccatcaagcattttatccgtactcctgatgatgcatggttactcaccactgcgatccccggaaaaacagcgttccaggtattagaagaatatcctgattcaggtgaaaatattgttgatgcgctggcagtgttcctgcgccggttgcactcgattcctgtttgtaattgtccttttaacagcgatcgcgtatttcgcctcgctcaggcgcaatcacgaatgaataacggtttggttgatgcgagtgattttgatgacgagcgtaatggctggcctgttgaacaagtctggaaagaaatgcataaacttttgccattctcaccggattcagtcgtcactcatggtgatttctcacttgataaccttatttttgacgaggggaaattaataggttgtattgatgttggacgagtcggaatcgcagaccgataccaggatcttgccatcctatggaactgcctcggtgagttttctccttcattacagaaacggctttttcaaaaatatggtattgataatcctgatatgaataaattgcagtttcatttgatgctcgatgagtttttctaaaagcagagcattacgctgacttgacgggacggcgcaagctcatgaccaaaatcccttaacgtgagttacgcgcgcgtcgttccactgagcgtcagaccccgtagaaaagatcaaaggatcttcttgagatcctttttttctgcgcgtaatctgctgcttgcaaacaaaaaaaccaccgctaccagcggtggtttgtttgccggatcaagagctaccaactctttttccgaaggtaactggcttcagcagagcgcagataccaaatactgttcttctagtgtagccgtagttagcccaccacttcaagaactctgtagcaccgcctacatacctcgctctgctaatcctgttaccagtggctgctgccagtggcgataagtcgtgtcttaccgggttggactcaagacgatagttaccggataaggcgcagcggtcgggctgaacggggggttcgtgcacacagcccagcttggaccagcttggagcgaacgacctacaccgaactgagatacctacagcgtgagctatgagaaagcgccacgcttcccgaagggagaaaggcggacaggtatccggtaagcggcagggtcggaacaggagagcgcacgagggagcttccagggggaaacgcctggtatctttatagtcctgtcgggtttcgccacctctgacttgagcgtcgatttttgtgatgctcgtcaggggggcggagcctatggaaaaacgccagcaacgcggcctttttacggttcctggccttttgctggccttttgctcacatgtttaaaccatg

SEQ ID NO: 92 - DNA, 11577 bp, Artificial Sequence
  pHELPK plasmid DNA
ggtacccaactccatgcttaacagtccccaggtacagcccaccctgcgtcgcaaccaggaacagctctacagcttcctggagcgccactcgccctacttccgcagccacagtgcgcagattaggagcgccacttctttttgtcacttgaaaaacatgtaaaaataatgtactaggagacactttcaataaaggcaaatgtttttatttgtacactctcgggtgattatttaccccccacccttgccgtctgcgccgtttaaaaatcaaaggggttctgccgcgcatcgctatgcgccactggcagggacacgttgcgatactggtgtttagtgctccacttaaactcaggcacaaccatccgcggcagctcggtgaagttttcactccacaggctgcgcaccatcaccaacgcgtttagcaggtcgggcgccgatatcttgaagtcgcagttggggcctccgccctgcgcgcgcgagttgcgatacacagggttgcagcactggaacactatcagcgccgggtggtgcacgctggccagcacgctcttgtcggagatcagatccgcgtccaggtcctccgcgttgctcagggcgaacggagtcaactttggtagctgccttcccaaaaagggtgcatgcccaggctttgagttgcactcgcaccgtagtggcatcagaaggtgaccgtgcccggtctgggcgttaggatacagcgcctgcatgaaagccttgatctgcttaaaagccacctgagcctttgcgccttcagagaagaacatgccgcaagacttgccggaaaactgattggccggacaggccgcgtcatgcacgcagcaccttgcgtcggtgttggagatctgcaccacatttcggccccaccggttcttcacgatcttggccttgctagactgctccttcagcgcgcgctgcccgttttcgctcgtcacatccatttcaatcacgtgctccttatttatcataatgctcccgtgtagacacttaagctcgccttcgatctcagcgcagcggtgcagccacaacgcgcagcccgtgggctcgtggtgcttgtaggttacctctgcaaacgactgcaggtacgcctgcaggaatcgccccatcatcgtcacaaaggtcttgttgctggtgaaggtcagctgcaacccgcggtgctcctcgtttagccaggtcttgcatacggccgccagagcttccacttggtcaggcagtagcttgaagtttgcctttagatcgttatccacgtggtacttgtccatcaacgcgcgcgcagcctccatgcccttctcccacgcagacacgatcggcaggctcagcgggtttatcaccgtgctttcactttccgcttcactggactcttccttttcctcttgcgtccgcataccccgcgccactgggtcgtcttcattcagccgccgcaccgtgcgcttacctcccttgccgtgcttgattagcaccggtgggttgctgaaacccaccatttgtagcgccacatcttctctttcttcctcgctgtccacgatcacctctggggatggcgggcgctcgggcttgggagaggggcgcttctttttctttttggacgcaatggccaaatccgccgtcgaggtcgatggccgcgggctgggtgtgcgcggcaccagcgcatcttgtgacgagtcttcttcgtcctcggactcgagacgccgcctcagccgcttttttgggggcgcgcggggaggcggcggcgacggcgacggggacgacacgtcctccatggttggtggacgtcgcgccgcaccgcgtccgcgctcgggggtggtttcgcgctgctcctcttcccgactggccatttccttctcctataggcagaaaaagatcatggagtcagtcgagaaggaggacagcctaaccgccccctttgagttcgccaccaccgcctccaccgatgccgccaacgcgcctaccaccttccccgtcgaggcacccccgcttgaggaggaggaagtgattatcgagcaggacccaggttttgtaagcgaagacgacgaggatcgctcagtaccaacagaggataaaaagcaagaccaggacgacgcagaggcaaacgaggaacaagtcgggcggggggaccaaaggcatggcgactacctagatgtgggagacgacgtgctgttgaagcatctgcagcgccagtgcgccattatctgcgacgcgttgcaagagcgcagcgatgtgcccctcgccatagcggatgtcagccttgcctacgaacgccacctgttctcaccgcgcgtaccccccaaacgccaagaaaacggcacatgcgagcccaacccgcgcctcaacttctaccccgtatttgccgtgccagaggtgcttgccacctatcacatctttttccaaaactgcaagatacccctatcctgccgtgccaaccgcagccgagcggacaagcagctggccttgcggcagggcgctgtcatacctgatatcgcctcgctcgacgaagtgccaaaaatctttgagggtcttggacgcgacgagaaacgcgcggcaaacgctctgcaacaagaaaacagcgaaaatgaaagtcactgtggagtgctggtggaacttgagggtgacaacgcgcgcctagccgtgctgaaacgcagcatcgaggtcacccactttgcctacccggcacttaacctaccccccaaggttatgagcacagtcatgagcgagctgatcgtgcgccgtgcacgacccctggagagggatgcaaacttgcaagaacaaaccgaggagggcctacccgcagttggcgatgagcagctggcgcgctggcttgagacgcgcgagcctgccgacttggaggagcgacgcaagctaatgatggccgcagtgcttgttaccgtggagcttgagtgcatgcagcggttctttgctgacccggagatgcagcgcaagctagaggaaacgttgcactacacctttcgccagggctacgtgcgccaggcctgcaaaatttccaacgtggagctctgcaacctggtctcctaccttggaattttgcacgaaaaccgcctcgggcaaaacgtgcttcattccacgctcaagggcgaggcgcgccgcgactacgtccgcgactgcgtttacttatttctgtgctacacctggcaaacggccatgggcgtgtggcagcaatgcctggaggagcgcaacctaaaggagctgcagaagctgctaaagcaaaacttgaaggacctatggacggccttcaacgagcgctccgtggccgcgcacctggcggacattatcttccccgaacgcctgcttaaaaccctgcaacagggtctgccagacttcaccagtcaaagcatgttgcaaaactttaggaactttatcctagagcgttcaggaattctgcccgccacctgctgtgcgcttcctagcgactttgtgcccattaagtaccgtgaatgccctccgccgctttggggtcactgctaccttctgcagctagccaactaccttgcctaccactccgacatcatggaagacgtgagcggtgacggcctactggagtgtcactgtcgctgcaacctatgcaccccgcaccgctccctggtctgcaattcgcaactgcttagcgaaagtcaaattatcggtacctttgagctgcagggtccctcgcctgacgaaaagtccgcggctccggggttgaaactcactccggggctgtggacgtcggcttaccttcgcaaatttgtacctgaggactaccacgcccacgagattaggttctacgaagaccaatcccgcccgccaaatgcggagcttaccgcctgcgtcattacccagggccacatccttggccaattgcaagccatcaacaaagcccgccaagagtttctgctacgaaagggacggggggtttacctggacccccagtccggcgaggagctcaacccaatccccccgccgccgcagccctatcagcagccgcgggcccttgcttcccaggatggcacccaaaaagaagctgcagctgccgccgccgccacccacggacgaggaggaatactgggacagtcaggcagaggaggttttggacgaggaggaggagatgatggaagactgggacagcctagacgaagcttccgaggccgaagaggtgtcagacgaaacaccgtcaccctcggtcgcattcccctcgccggcgccccagaaattggcaaccgttcccagcatcgctacaacctccgctcctcaggcgccgccggcactgcctgttcgccgacccaaccgtagatgggacaccactggaaccagggccggtaagtctaagcagccgccgccgttagcccaagagcaacaacagcgccaaggctaccgctcgtggcgcgggcacaagaacgccatagttgcttgcttgcaagactgtgggggcaacatctccttcgcccgccgctttcttctctaccatcacggcgtggccttcccccgtaacatcctgcattactaccgtcatctctacagcccctactgcaccggcggcagcggcagcggcagcaacagcagcggtcacacagaagcaaaggcgaccggatagcaagactctgacaaagcccaagaaatccacagcggcggcagcagcaggaggaggagcgctgcgtctggcgcccaacgaacccgtatcgacccgcgagcttagaaataggatttttcccactctgtatgctatatttcaacaaagcaggggccaagaacaagagctgaaaataaaaaacaggtctctgcgctccctcacccgcagctgcctgtatcacaaaagcgaagatcagcttcggcgcacgctggaagacgcggaggctctcttcagcaaatactgcgcgctgactcttaaggactagtttcgcgccctttctcaaatttaagcgcgaaaactacgtcatctccagcggccacacccggcgccagcacctgtcgtcagcgccattatgagcaaggaaattcccacgccctacatgtggagttaccagccacaaatgggacttgcggctggagctgcccaagactactcaacccgaataaactacatgagcgcgggaccccacatgatatcccgggtcaacggaatccgcgcccaccgaaaccgaattctcctcgaacaggcggctattaccaccacacctcgtaataaccttaatccccgtagttggcccgctgccctggtgtaccaggaaagtcccgctcccaccactgtggtacttcccagagacgcccaggccgaagttcagatgactaactcaggggcgcagcttgcgggcggctttcgtcacagggtgcggtcgcccgggcgttttagggcggagtaacttgcatgtattgggaattgtagtttttttaaaatgggaagtgacgtatcgtgggaaaacggaagtgaagatttgaggaagttgtgggttttttggctttcgtttctgggcgtaggttcgcgtgcggttttctgggtgttttttgtggactttaaccgttacgtcattttttagtcctatatatactcgctctgtacttggccctttttacactgtgactgattgagctggtgccgtgtcgagtggtgttttttaataggtttttttactggtaaggctgactgttatggctgccgctgtggaagcgctgtatgttgttctggagcgggagggtgctattttgcctaggcaggagggtttttcaggtgtttatgtgtttttctctcctattaattttgttatacctcctatgggggctgtaatgttgtctctacgcctgcgggtatgtattcccccgggctatttcggtcgctttttagcactgaccgatgttaaccaacctgatgtgtttaccgagtcttacattatgactccggacatgaccgaggaactgtcggtggtgctttttaatcacggtgaccagtttttttacggtcacgccggcatggccgtagtccgtcttatgcttataagggttgtttttcctgttgtaagacaggcttctaatgtttaaatgtttttttttttgttattttattttgtgtttaatgcaggaacccgcagacatgtttgagagaaaaatggtgtctttttctgtggtggttccggaacttacctgcctttatctgcatgagcatgactacgatgtgcttgcttttttgcgcgaggctttgcctgattttttgagcagcaccttgcattttatatcgccgcccatgcaacaagcttacataggggctacgctggttagcatagctccgagtatgcgtgtcataatcagtgtgggttcttttgtcatggttcctggcggggaagtggccgcgctggtccgtgcagacctgcacgattatgttcagctggccctgcgaagggacctacgggatcgcggtatttttgttaatgttccgcttttgaatcttatacaggtctgtgaggaacctgaatttttgcaatcatgattcgctgcttgaggctgaaggtggagggcgctctggagcagatttttacaatggccggacttaatattcgggatttgcttagagacatattgataaggtggcgagatgaaaattatttgggcatggttgaaggtgctggaatgtttatagaggagattcaccctgaagggtttagcctttacgtccacttggacgtgagggcagtttgccttttggaagccattgtgcaacatcttacaaatgccattatctgttctttggctgtagagtttgaccacgccaccggaggggagcgcgttcacttaatagatcttcattttgaggttttggataatcttttggaataaaaaaaaaaaaacatggttcttccagctcttcccgctcctcccgtgtgtgactcgcagaacgaatgtgtaggttggctgggtgtggcttattctgcggtggtggatgttatcagggcagcggcgcatgaaggagtttacatagaacccgaagccagggggcgcctggatgctttgagagagtggatatactacaactactacacagagcgagctaagcgacgagaccggagacgcagatctgtttgtcacgcccgcacctggttttgcttcaggaaatatgactacgtccggcgttccatttggcatgacactacgaccaacacgatctcggttgtctcggcgcactccgtacagtagggatcgcctacctccttttgagacagagacccgcgctaccatactggaggatcatccgctgctgcccgaatgtaacactttgacaatgcacaacgtgagttacgtgcgaggtcttccctgcagtgtgggatttacgctgattcaggaatgggttgttccctgggatatggttctgacgcgggaggagcttgtaatcctgaggaagtgtatgcacgtgtgcctgtgttgtgccaacattgatatcatgacgagcatgatgatccatggttacgagtcctgggctctccactgtcattgttccagtcccggttccctgcagtgcatagccggcgggcaggttttggccagctggtttaggatggtggtggatggcgccatgtttaatcagaggtttatatggtaccgggaggtggtgaattacaacatgccaaaagaggtaatgtttatgtccagcgtgtttatgaggggtcgccacttaatctacctgcgcttgtggtatgatggccacgtgggttctgtggtccccgccatgagctttggatacagcgccttgcactgtgggattttgaacaatattgtggtgctgtgctgcagttactgtgctgatttaagtgagatcagggtgcgctgctgtgcccggaggacaaggcgtctcatgctgcgggcggtgcgaatcatcgctgaggagaccactgccatgttgtattcctgcaggacggagcggcggcggcagcagtttattcgcgcgctgctgcagcaccaccgccctatcctgatgcacgattatgactctacccccatgtaggcgtggacttccccttcgccgcccgttgagcaaccgcaagttggacagcagcctgtggctcagcagctggacagcgacatgaacttaagcgagctgcccggggagtttattaatatcactgatgagcgtttggctcgacaggaaaccgtgtggaatataacacctaagaatatgtctgttacccatgatatgatgctttttaaggccagccggggagaaaggactgtgtactctgtgtgttgggagggaggtggcaggttgaatactagggttctgtgagtttgattaaggtacggtgatcaatataagctatgtggtggtggggctatactactgaatgaaaaatgacttgaaattttctgcaattgaaaaataaacacgttgaaacataacatgcaacaggttcacgattctttattcctgggcaatgtaggagaaggtgtaagagttggtagcaaaagtttcagtggtgtattttccactttcccaggaccatgtaaaagacatagagtaagtgcttacctcgctagtttctgtggattcactagaatcgatgtaggatgttgcccctcctgacgcggtaggagaaggggagggtgccctgcatgtctgccgctgctcttgctcttgccgctgctgaggaggggggcgcatctgccgcagcaccggatgcatctgggaaaagcaaaaaaggggctcgtccctgtttccggaggaatttgcaagcggggtcttgcatgacggggaggcaaacccccgttcgccgcagtccggccggcccgagactcgaaccgggggtcctgcgactcaacccttggaaaataaccctccggctacagggagcgagccacttaatgctttcgctttccagcctaaccgcttacgccgcgcgcggccagtggccaaaaaagctagcgcagcagccgccgcgcctggaaggaagccaaaaggagcgctcccccgttgtctgacgtcgcacacctgggttcgacacgcgggcggtaaccgcatggatcacggcggacggccggatccggggttcgaaccccggtcgtccgccatgatacccttgcgaatttatccaccagaccacggaagagtgcccgcttacaggctctccttttgcacggtctagagcgtcaacgactgcgcacgcctcaccggccagagcgtcccgaccatggagcactttttgccgctgcgcaacatctggaaccgcgtccgcgactttccgcgcgcctccaccaccgccgccggcatcacctggatgtccaggtacatctacggattacgtcgacgtttaaaccatatgatcagctcactcaaaggcggtaatacggttatccacagaatcaggggataacgcaggaaagaacatgtgagcaaaaggccagcaaaaggccaggaaccgtaaaaaggccgcgttgctggcgtttttccataggctccgcccccctgacgagcatcacaaaaatcgacgctcaagtcagaggtggcgaaacccgacaggactataaagataccaggcgtttccccctggaagctccctcgtgcgctctcctgttccgaccctgccgcttaccggatacctgtccgcctttctcccttcgggaagcgtggcgctttctcatagctcacgctgtaggtatctcagttcggtgtaggtcgttcgctccaagctgggctgtgtgcacgaaccccccgttcagcccgaccgctgcgccttatccggtaactatcgtcttgagtccaacccggtaagacacgacttatcgccactggcagcagccactggtaacaggattagcagagcgaggtatgtaggcggtgctacagagttcttgaagtggtggcctaactacggctacactagaagaacagtatttggtatctgcgctctgctgaagccagttaccttcggaaaaagagttggtagctcttgatccggcaaacaaaccaccgctggtagcggtggtttttttgtttgcaagcagcagattacgcgcagaaaaaaaggatctcaagaagatcctttgatcttttctacggggtctgacgctcagtggaacgaaaactcacgttaagggattttggtcatgagattatcaaaaaggatcttcacctagatccttttaaattaaaaatgaagttttaaatcaatctaaagtatatatgagtaaacttggtctgacagttagaaaaactcatcgagcatcaaatgaaactgcaatttattcatatcaggattatcaataccatatttttgaaaaagccgtttctgtaatgaaggagaaaactcaccgaggcagttccataggatggcaagatcctggtatcggtctgcgattccgactcgtccaacatcaatacaacctattaatttcccctcgtcaaaaataaggttatcaagtgagaaatcaccatgagtgacgactgaatccggtgagaatggcaaaagtttatgcatttctttccagacttgttcaacaggccagccattacgctcgtcatcaaaatcactcgcatcaaccaaaccgttattcattcgtgattgcgcctgagcgagacgaaatacgcgatcgctgttaaaaggacaattacaaacaggaatcgaatgcaaccggcgcaggaacactgccagcgcatcaacaatattttcacctgaatcaggatattcttctaatacctggaatgctgttttcccagggatcgcagtggtgagtaaccatgcatcatcaggagtacggataaaatgcttgatggtcggaagaggcataaattccgtcagccagtttagtctgaccatctcatctgtaacatcattggcaacgctacctttgccatgtttcagaaacaactctggcgcatcgggcttcccatacaatcgatagattgtcgcacctgattgcccgacattatcgcgagcccatttatacccatataaatcagcatccatgttggaatttaatcgcggcctagagcaagacgtttcccgttgaatatggctcatactcttcctttttcaatattattgaagcatttatcagggttattgtctcatgagcggatacatatttgaatgtatttagaaaaataaacaaataggggttccgcgcacatttccccgaaaagtgccacctgacgtctaagaaaccattattatcatgacattaacctataaaaataggcgtatcacgaggccctttcgtctcgcgcgtttcggtgatgacggtgaaaacctctgacacatgcagctcccggagacggtcacagcttgtctgtaagcggatgccgggagcagacaacaacgtcaaagggcgaaaaaccgtctatcagggcgatggcccactacgtgaaccatcaccctaatcaagttttttggggtcgaggtgccgtaaagcactaaatcggaaccctaaagggagcccccgatttagagcttgacggggaaagccggcgaacgtggcgagaaaggaagggaagaaagcgaaaggagcgggcgctagggcgctggcaagtgtagcggtcacgctgcgcgtaaccaccacacccgccgcgcttaatgcgccgctacagggcgcgatggatcc

SEQ ID NO: 93 - DNA, 4443 bp, Artificial Sequence
  CFTR
atgcagagaagccccctggagaaggcctctgtggtgagcaagctgttcttcagctggaccagacccatcctgagaaagggctacagacagagactggagctgtctgacatctaccagatcccctctgtggactctgctgacaacctgtctgagaagctggagagagagtgggacagagagctggccagcaagaagaaccccaagctgatcaatgccctgagaagatgcttcttctggagattcatgttctatggcatcttcctgtacctgggggaggtgaccaaggctgtgcagcccctgctgctgggcagaatcattgccagctatgaccctgacaacaaggaggagagaagcattgccatctacctgggcattggcctgtgcctgctgttcattgtgagaaccctgctgctgcaccctgccatctttggcctgcaccacattggcatgcagatgagaattgccatgttcagcctgatctacaagaagaccctgaagctgagcagcagagtgctggacaagatcagcattggccagctggtgagcctgctgagcaacaacctgaacaagtttgatgagggcctggccctggcccactttgtgtggattgcccccctgcaggtggccctgctgatgggcctgatctgggagctgctgcaggcctctgccttctgtggcctgggcttcctgattgtgctggccctgttccaggctggcctgggcagaatgatgatgaagtacagagaccagagagctggcaagatctctgagagactggtgatcacctctgagatgattgagaacatccagtctgtgaaggcctactgctgggaggaggccatggagaagatgattgagaacctgagacagacagagctgaagctgaccagaaaggctgcctatgtgagatacttcaacagctctgccttcttcttctctggcttctttgtggtgttcctgtctgtgctgccctatgccctgatcaagggcatcatcctgagaaagatcttcaccaccatcagcttctgcattgtgctgagaatggctgtgaccagacagttcccctgggctgtgcagacctggtatgacagcctgggggccatcaacaagatccaggacttcctgcagaagcaggagtacaagaccctggagtacaacctgaccaccacagaggtggtgatggagaatgtgacagccttctgggaggagggctttggggagctgtttgagaaggccaagcagaacaacaacaacagaaagaccagcaatggggatgacagcctgttcttcagcaacttcagcctgctgggcacccctgtgctgaaggacatcaacttcaagattgagagaggccagctgctggctgtggctggcagcacaggggctggcaagaccagcctgctgatgatgatcatgggggagctggagccctctgagggcaagatcaagcactctggcagaatcagcttctgcagccagttcagctggatcatgcctggcaccatcaaggagaacatcatctttggggtgagctatgatgagtacagatacagatctgtgatcaaggcctgccagctggaggaggacatcagcaagtttgctgagaaggacaacattgtgctgggggaggggggcatcaccctgtctgggggccagagagccagaatcagcctggccagagctgtgtacaaggatgctgacctgtacctgctggacagcccctttggctacctggatgtgctgacagagaaggagatctttgagagctgtgtgtgcaagctgatggccaacaagaccagaatcctggtgaccagcaagatggagcacctgaagaaggctgacaagatcctgatcctgcatgagggcagcagctacttctatggcaccttctctgagctgcagaacctgcagcctgacttcagcagcaagctgatgggctgtgacagctttgaccagttctctgctgagagaagaaacagcatcctgacagagaccctgcacagattcagcctggagggggatgcccctgtgagctggacagagaccaagaagcagagcttcaagcagacaggggagtttggggagaagagaaagaacagcatcctgaaccccatcaacagcatcagaaagttcagcattgtgcagaagacccccctgcagatgaatggcattgaggaggactctgatgagcccctggagagaagactgagcctggtgcctgactctgagcagggggaggccatcctgcccagaatctctgtgatcagcacaggccccaccctgcaggccagaagaagacagtctgtgctgaacctgatgacccactctgtgaaccagggccagaacatccacagaaagaccacagccagcaccagaaaggtgagcctggccccccaggccaacctgacagagctggacatctacagcagaagactgagccaggagacaggcctggagatctctgaggagatcaatgaggaggacctgaaggagtgcttctttgatgacatggagagcatccctgctgtgaccacctggaacacctacctgagatacatcacagtgcacaagagcctgatctttgtgctgatctggtgcctggtgatcttcctggctgaggtggctgccagcctggtggtgctgtggctgctgggcaacacccccctgcaggacaagggcaacagcacccacagcagaaacaacagctatgctgtgatcatcaccagcaccagcagctactatgtgttctacatctatgtgggggtggctgacaccctgctggccatgggcttcttcagaggcctgcccctggtgcacaccctgatcacagtgagcaagatcctgcaccacaagatgctgcactctgtgctgcaggcccccatgagcaccctgaacaccctgaaggctgggggcatcctgaacagattcagcaaggacattgccatcctggatgacctgctgcccctgaccatctttgacttcatccagctgctgctgattgtgattggggccattgctgtggtggctgtgctgcagccctacatctttgtggccacagtgcctgtgattgtggccttcatcatgctgagagcctacttcctgcagaccagccagcagctgaagcagctggagtctgagggcagaagccccatcttcacccacctggtgaccagcctgaagggcctgtggaccctgagagcctttggcagacagccctactttgagaccctgttccacaaggccctgaacctgcacacagccaactggttcctgtacctgagcaccctgagatggttccagatgagaattgagatgatctttgtgatcttcttcattgctgtgaccttcatcagcatcctgaccacaggggagggggagggcagagtgggcatcatcctgaccctggccatgaacatcatgagcaccctgcagtgggctgtgaacagcagcattgatgtggacagcctgatgagatctgtgagcagagtgttcaagttcattgacatgcccacagagggcaagcccaccaagagcaccaagccctacaagaatggccagctgagcaaggtgatgatcattgagaacagccatgtgaagaaggatgacatctggccctctgggggccagatgacagtgaaggacctgacagccaagtacacagaggggggcaatgccatcctggagaacatcagcttcagcatcagccctggccagagagtgggcctgctgggcagaacaggctctggcaagagcaccctgctgtctgccttcctgagactgctgaacacagagggggagatccagattgatggggtgagctgggacagcatcaccctgcagcagtggagaaaggcctttggggtgatcccccagaaggtgttcatcttctctggcaccttcagaaagaacctggacccctatgagcagtggtctgaccaggagatctggaaggtggctgatgaggtgggcctgagatctgtgattgagcagttccctggcaagctggactttgtgctggtggatgggggctgtgtgctgagccatggccacaagcagctgatgtgcctggccagatctgtgctgagcaaggccaagatcctgctgctggatgagccctctgcccacctggaccctgtgacctaccagatcatcagaagaaccctgaagcaggcctttgctgactgcacagtgatcctgtgtgagcacagaattgaggccatgctggagtgccagcagttcctggtgattgaggagaacaaggtgagacagtatgacagcatccagaagctgctgaatgagagaagcctgttcagacaggccatcagcccctctgacagagtgaagctgttcccccacagaaacagcagcaagtgcaagagcaagccccagattgctgccctgaaggaggagaccgaggaggaggtgcaggacaccagactgtaa

SEQ ID NO: 94 - protein, 1480 aa, Artificial Sequence
  CFTR protein
MQRSPLEKASVVSKLFFSWTRPILRKGYRQRLELSDIYQIPSVDSADNLSEKLEREWDRELASKKNPKLINALRRCFFWRFMFYGIFLYLGEVTKAVQPLLLGRIIASYDPDNKEERSIAIYLGIGLCLLFIVRTLLLHPAIFGLHHIGMQMRIAMFSLIYKKTLKLSSRVLDKISIGQLVSLLSNNLNKFDEGLALAHFVWIAPLQVALLMGLIWELLQASAFCGLGFLIVLALFQAGLGRMMMKYRDQRAGKISERLVITSEMIENIQSVKAYCWEEAMEKMIENLRQTELKLTRKAAYVRYFNSSAFFFSGFFVVFLSVLPYALIKGIILRKIFTTISFCIVLRMAVTRQFPWAVQTWYDSLGAINKIQDFLQKQEYKTLEYNLTTTEVVMENVTAFWEEGFGELFEKAKQNNNNRKTSNGDDSLFFSNFSLLGTPVLKDINFKIERGQLLAVAGSTGAGKTSLLMMIMGELEPSEGKIKHSGRISFCSQFSWIMPGTIKENIIFGVSYDEYRYRSVIKACQLEEDISKFAEKDNIVLGEGGITLSGGQRARISLARAVYKDADLYLLDSPFGYLDVLTEKEIFESCVCKLMANKTRILVTSKMEHLKKADKILILHEGSSYFYGTFSELQNLQPDFSSKLMGCDSFDQFSAERRNSILTETLHRFSLEGDAPVSWTETKKQSFKQTGEFGEKRKNSILNPINSIRKFSIVQKTPLQMNGIEEDSDEPLERRLSLVPDSEQGEAILPRISVISTGPTLQARRRQSVLNLMTHSVNQGQNIHRKTTASTRKVSLAPQANLTELDIYSRRLSQETGLEISEEINEEDLKECFFDDMESIPAVTTWNTYLRYITVHKSLIFVLIWCLVIFLAEVAASLVVLWLLGNTPLQDKGNSTHSRNNSYAVIITSTSSYYVFYIYVGVADTLLAMGFFRGLPLVHTLITVSKILHHKMLHSVLQAPMSTLNTLKAGGILNRFSKDIAILDDLLPLTIFDFIQLLLIVIGAIAVVAVLQPYIFVATVPVIVAFIMLRAYFLQTSQQLKQLESEGRSPIFTHLVTSLKGLWTLRAFGRQPYFETLFHKALNLHTANWFLYLSTLRWFQMRIEMIFVIFFIAVTFISILTTGEGEGRVGIILTLAMNIMSTLQWAVNSSIDVDSLMRSVSRVFKFIDMPTEGKPTKSTKPYKNGQLSKVMIIENSHVKKDDIWPSGGQMTVKDLTAKYTEGGNAILENISFSISPGQRVGLLGRTGSGKSTLLSAFLRLLNTEGEIQIDGVSWDSITLQQWRKAFGVIPQKVFIFSGTFRKNLDPYEQWSDQEIWKVADEVGLRSVIEQFPGKLDFVLVDGGCVLSHGHKQLMCLARSVLSKAKILLLDEPSAHLDPVTYQIIRRTLKQAFADCTVILCEHRIEAMLECQQFLVIEENKVRQYDSIQKLLNERSLFRQAISPSDRVKLFPHRNSSKCKSKPQIAALKEETEEEVQDTRL

SEQ ID NO: 95 - protein, 1428 aa, Artificial Sequence
  CFTRdeltaR protein
MQRSPLEKASVVSKLFFSWTRPILRKGYRQRLELSDIYQIPSVDSADNLSEKLEREWDRELASKKNPKLINALRRCFFWRFMFYGIFLYLGEVTKAVQPLLLGRIIASYDPDNKEERSIAIYLGIGLCLLFIVRTLLLHPAIFGLHHIGMQMRIAMFSLIYKKTLKLSSRVLDKISIGQLVSLLSNNLNKFDEGLALAHFVWIAPLQVALLMGLIWELLQASAFCGLGFLIVLALFQAGLGRMMMKYRDQRAGKISERLVITSEMIENIQSVKAYCWEEAMEKMIENLRQTELKLTRKAAYVRYFNSSAFFFSGFFVVFLSVLPYALIKGIILRKIFTTISFCIVLRMAVTRQFPWAVQTWYDSLGAINKIQDFLQKQEYKTLEYNLTTTEVVMENVTAFWEEGFGELFEKAKQNNNNRKTSNGDDSLFFSNFSLLGTPVLKDINFKIERGQLLAVAGSTGAGKTSLLMMIMGELEPSEGKIKHSGRISFCSQFSWIMPGTIKENIIFGVSYDEYRYRSVIKACQLEEDISKFAEKDNIVLGEGGITLSGGQRARISLARAVYKDADLYLLDSPFGYLDVLTEKEIFESCVCKLMANKTRILVTSKMEHLKKADKILILHEGSSYFYGTFSELQNLQPDFSSKLMGCDSFDQFSAERRNSILTETLHRFSLEGDAPVSWTETKKQSFKQTGEFGEKRKNSILNPINSTLQARRRQSVLNLMTHSVNQGQNIHRKTTASTRKVSLAPQANLTELDIYSRRLSQETGLEISEEINEEDLKECFFDDMESIPAVTTWNTYLRYITVHKSLIFVLIWCLVIFLAEVAASLVVLWLLGNTPLQDKGNSTHSRNNSYAVIITSTSSYYVFYIYVGVADTLLAMGFFRGLPLVHTLITVSKILHHKMLHSVLQAPMSTLNTLKAGGILNRFSKDIAILDDLLPLTIFDFIQLLLIVIGAIAVVAVLQPYIFVATVPVIVAFIMLRAYFLQTSQQLKQLESEGRSPIFTHLVTSLKGLWTLRAFGRQPYFETLFHKALNLHTANWFLYLSTLRWFQMRIEMIFVIFFIAVTFISILTTGEGEGRVGIILTLAMNIMSTLQWAVNSSIDVDSLMRSVSRVFKFIDMPTEGKPTKSTKPYKNGQLSKVMIIENSHVKKDDIWPSGGQMTVKDLTAKYTEGGNAILENISFSISPGQRVGLLGRTGSGKSTLLSAFLRLLNTEGEIQIDGVSWDSITLQQWRKAFGVIPQKVFIFSGTFRKNLDPYEQWSDQEIWKVADEVGLRSVIEQFPGKLDFVLVDGGCVLSHGHKQLMCLARSVLSKAKILLLDEPSAHLDPVTYQIIRRTLKQAFADCTVILCEHRIEAMLECQQFLVIEENKVRQYDSIQKLLNERSLFRQAISPSDRVKLFPHRNSSKCKSKPQIAALKEETEEEVQDTRL

SEQ ID NO: 96 - DNA, 250 bp, Artificial Sequence
  Mouse U1a promoter sequence
atggaggcggtactatgtagatgagaattcaggagcaaactgggaaaagcaactgcttccaaatatttgtgatttttacagtgtagttttggaaaaactcttagcctaccaattcttctaagtgttttaaaatgtgggagccagtacacatgaagttatagagtgttttaatgaggcttaaatatttaccgtaactatgaaatgctacgcatatcatgctgttcaggctccgtggccacgcaactcatac

SEQ ID NO: 97 - DNA, 101 bp, Artificial Sequence
  Polymerase III H1 mutant promoter sequence
aatatttgcatgtcgctatgtgttctgggaaatcaccataaacgtgaaatgtctttggatttgggaatcttcgaagttctgtatgagaccacagatctcca

SEQ ID NO: 98 - DNA, 2214 bp, Artificial Sequence
  AAV110 DNA
atggctgccgatggttatcttccagattggctcgaggacaacctctctgagggcattcgcgagtggtgggacttgaaacctggagccccgaaacccaaagccaaccagcaaaagcaggacgacggccggggtctggtgcttcctggctacaagtacctcggacccttcaacggactcgacaagggggagcccgtcaacgcggcggatgcagcggccctcgagcacgacaaggcctacgaccagcagctcaaagcgggtgacaatccgtacctgcggtataaccacgccgacgccgagtttcaggagcgtctgcaagaagatacgtcttttgggggcaacctcgggcgagcagtcttccaggccaagaagcgggttctcgaacctctcggtctggttgaggaaggcgctaagacggctcctggaaagaagagaccggtagagccatcaccccagcgttctccagactcctctacgggcatcggcaagaaaggccaacagcccgccagaaaaagactcaattttggtcagactggcgactcagagtcagtccccgacccacaacctctcggagaacctccagcaacccccgctgctgtgggacctactacaatggcttcaggcggtggcgcaccaatggcagacaataacgaaggcgccgacggagtgggtaatgcctcaggaaattggcattgcgattccacatggctgggcgacagagtcatcaccaccagcacccgaacatgggccttgcccacctataacaaccacctctacaagcaaatctccagtgcttcaacgggggccagcaacgacaaccactacttcggctacagcaccccctgggggtattttgatttcaacagattccactgccatttctcaccacgtgactggcagcgactcatcaacaacaattggggattccggcccaagagactcaacttcaagctcttcaacatccaagtcaaggaggtcacgacgaatgatggcgtcacgaccatcgctaataaccttaccagcacggttcaagtcttctcggactcggagtaccagttgccgtacgtcctcggctctgcgcaccagggctgcctccctccgttcccggcggacgtgttcatgattccgcagtacggctacctaacgctcaacaatggcagccaggcagtgggacggtcatccttttactgcctggaatatttcccatcgcagatgctgagaacgggcaataactttaccttcagctacaccttcgaggacgtgcctttccacagcagctacgcgcacagccagagcctggaccggctgatgaatcctctcatcgaccagtacctgtattacctgaacagaactcagaatcagtccggaagtgcccaaaacaaggacttgctgtttagccgggggtctccagctggcatgtctgttcagcccaaaaactggctacctggaccctgttaccggcagcagcgcgtttctaaaacaaaaacagacaacaacaacagcaactttacctggactggtgcttcaaaatataaccttaatgggcgtgaatctataatcaaccctggcactgctatggcctcacacaaagacgacaaagacaagttctttcccatgagcggtgtcatgatttttggaaaggagagcgccggagcttcaaacactgcattggacaatgtcatgatcacagacgaagaggaaatcaaagccactaaccccgtggccaccgaaagatttgggactgtggcagtcaatctccagagcagcagcacagaccctgcgaccggagatgtgcatgttatgggagccttacctggaatggtgtggcaagacagagacgtatacctgcagggtcctatttgggccaaaattcctcacacggatggacactttcacccgtctcctctcatgggcggctttggacttaagcacccgcctcctcagatcctcatcaaaaacacgcctgttcctgcgaatcctccggcagagttttcggctacaaagtttgcttcattcatcacccagtattccacaggacaagtgagcgtggagattgaatgggagctgcagaaagaaaacagcaaacgctggaatcccgaagtgcagtatacatctaactatgcaaaatctgccaacgttgatttcactgtggacaacaatggactttatactgagcctcgccccattggcacccgttacctcacccgtcccctgtaa

SEQ ID NO: 99 - DNA, 1509 bp, Homo sapiens
  misc_feature (1)..(1509): Sulfoglucosamine sulfohydrolase (SGSH)
atgagctgccccgtgcccgcctgctgcgcgctgctgctagtcctggggctctgccgggcgcgtccccggaacgcactgctgctcctcgcggatgacggaggctttgagagtggcgcgtacaacaacagcgccatcgccaccccgcacctggacgccttggcccgccgcagcctcctctttcgcaatgccttcacctcggtcagcagctgctctcccagccgcgccagcctcctcactggcctgccccagcatcagaatgggatgtacgggctgcaccaggacgtgcaccacttcaactccttcgacaaggtgcggagcctgccgctgctgctcagccaagctggtgtgcgcacaggcatcatcgggaagaagcacgtggggccggagaccgtgtacccgtttgactttgcgtacacggaggagaatggctccgtcctccaggtggggcggaacatcactagaattaagctgctcgtccggaaattcctgcagactcaggatgaccagcctttcttcctctacgtcgccttccacgacccccaccgctgtgggcactcccagccccagtacggaaccttctgtgagaagtttggcaacggagagagcggcatgggtcgtatcccagactggaccccccaggcctacgacccactggacgtgctggtgccttacttcgtccccaacaccccggcagcccgagccgacctggccgctcagtacaccaccgtcggccgcatggaccaaggagttggactggtgctccaggagctgcgtgacgccggtgtcctgaacgacacactggtgatcttcacgtccgacaacgggatccccttccccagcggcaggaccaacctgtactggccgggcactgctgaacccttactggtgtcatccccggagcacccaaaacgctggggccaagtcagcgaggcctacgtgagcctcctagacctcacgcccaccatcttggattggttctcgatcccgtaccccagctacgccatctttggctcgaagaccatccacctcactggccggtccctcctgccggcgctggaggccgagcccctctgggccaccgtctttggcagccagagccaccacgaggtcaccatgtcctaccccatgcgctccgtgcagcaccggcacttccgcctcgtgcacaacctcaacttcaagatgccctttcccatcgaccaggacttctacgtctcacccaccttccaggacctcctgaaccgcaccacagctggtcagcccacgggctggtacaaggacctccgtcattactactaccgggcgcgctgggagctctacgaccggagccgggacccccacgagacccagaacctggccaccgacccgcgctttgctcagcttctggagatgcttcgggaccagctggccaagtggcagtgggagacccacgacccctgggtgtgcgcccccgacggcgtcctggaggagaagctctctccccagtgccagcccctccacaatgagctgtga

SEQ ID NO: 100 - DNA, 1509 bp, Artificial Sequence
  Codon optimized CO1-SGSH
atgagctgtcctgttccagcctgttgtgccctgctgctggttctgggactgtgcagagccagacctaggaacgctctgctgctgctcgctgacgatggcggatttgagagcggcgcctacaacaacagcgccattgccacacctcacctggatgccctggccagaagaagcctgctgttcagaaacgccttcaccagcgtgtccagctgcagcccttctagagctagcctgctgacaggactgccccagcaccagaatgggatgtatggcctgcaccaggacgtgcaccacttcaacagcttcgacaaagtgcggagcctgcctctgcttctgtctcaagccggcgtcagaacaggcatcatcggcaagaaacacgtgggccccgagacagtgtaccccttcgatttcgcctacaccgaagagaacggcagcgtgctgcaagtgggcagaaacatcacccggatcaagctgctcgtgcggaagttcctgcagacccaggacgaccagcctttcttcctgtacgtggccttccacgatcctcacagatgcggccatagccagcctcagtacggcaccttctgcgagaagtttggcaacggcgagagcggcatgggcagaatccctgattggacccctcaggcctacgatcccctggatgtgctggtgccttacttcgtgcctaacacaccagccgccagagccgatctggccgctcagtatacaaccgtgggaagaatggaccaaggcgtcggcctggttctgcaagagcttagagatgccggcgtgctgaacgacaccctggtcatctttaccagcgacaacggcatcccctttccatctggccggaccaatctgtactggcctggaacagctgagcccctgctggtgtctagccctgagcaccctaagagatggggccaagtgtctgaggcctacgtgtccctgctggatctgacccctaccatcctggactggttcagcatcccctatcctagctacgccatcttcggcagcaagaccatccacctgaccggcagatctctgctgccagctctggaagctgaacctctgtgggccacagtgtttggcagccagtctcaccacgaagtgacaatgagctaccccatgcggagcgtgcagcacagacacttcagactggtgcacaacctgaacttcaagatgccctttccaatcgaccaggacttctatgtgtccccaaccttccaggacctgctgaacagaaccacagccggccaacctaccggctggtacaaggacctgcggcactactactatagagccagatgggagctgtacgaccggtccagagatccccacgagacacagaacctggccaccgatcctagattcgcccagctgctggaaatgctgagagatcagctggccaagtggcagtgggagacacacgatccttgggtctgcgctcctgatggcgtgctggaagagaagctgtcccctcagtgtcagcccctgcacaacgagctttaa

SEQ ID NO: 101 - DNA, 1596 bp, Artificial Sequence
  Codon optimized + GET CO1-SGSH-GET
atgagctgtcctgttccagcctgttgtgccctgctgctggttctgggactgtgcagagccagacctaggaacgctctgctgctgctcgctgacgatggcggatttgagagcggcgcctacaacaacagcgccattgccacacctcacctggatgccctggccagaagaagcctgctgttcagaaacgccttcaccagcgtgtccagctgcagcccttctagagctagcctgctgacaggactgccccagcaccagaatgggatgtatggcctgcaccaggacgtgcaccacttcaacagcttcgacaaagtgcggagcctgcctctgcttctgtctcaagccggcgtcagaacaggcatcatcggcaagaaacacgtgggccccgagacagtgtaccccttcgatttcgcctacaccgaagagaacggcagcgtgctgcaagtgggcagaaacatcacccggatcaagctgctcgtgcggaagttcctgcagacccaggacgaccagcctttcttcctgtacgtggccttccacgatcctcacagatgcggccatagccagcctcagtacggcaccttctgcgagaagtttggcaacggcgagagcggcatgggcagaatccctgattggacccctcaggcctacgatcccctggatgtgctggtgccttacttcgtgcctaacacaccagccgccagagccgatctggccgctcagtatacaaccgtgggaagaatggaccaaggcgtcggcctggttctgcaagagcttagagatgccggcgtgctgaacgacaccctggtcatctttaccagcgacaacggcatcccctttccatctggccggaccaatctgtactggcctggaacagctgagcccctgctggtgtctagccctgagcaccctaagagatggggccaagtgtctgaggcctacgtgtccctgctggatctgacccctaccatcctggactggttcagcatcccctatcctagctacgccatcttcggcagcaagaccatccacctgaccggcagatctctgctgccagctctggaagctgaacctctgtgggccacagtgtttggcagccagtctcaccacgaagtgacaatgagctaccccatgcggagcgtgcagcacagacacttcagactggtgcacaacctgaacttcaagatgccctttccaatcgaccaggacttctatgtgtccccaaccttccaggacctgctgaacagaaccacagccggccaacctaccggctggtacaaggacctgcggcactactactatagagccagatgggagctgtacgaccggtccagagatccccacgagacacagaacctggccaccgatcctagattcgcccagctgctggaaatgctgagagatcagctggccaagtggcagtgggagacacacgatccttgggtctgcgctcctgatggcgtgctggaagagaagctgtcccctcagtgtcagcccctgcacaacgagctgcggcgtcgtcggcgaagaagaagaaagcgcaagaaaaaaggcaaaggcctgggcaagaagcgggacccctgtctgagaaagtacaaataa

SEQ ID NO: 102 - DNA, 1509 bp, Artificial Sequence
  Codon optimized CO2-SGSH
atgagctgccctgtgcctgcctgctgtgccctgctgctggtgctgggcctgtgcagagccagacctaggaatgccctgctgctgctggctgatgatgggggctttgagagtggggcctacaacaacagtgccattgccaccccccacctggatgccctggccagaagaagcctgctgttcagaaatgccttcaccagtgtgagcagctgcagccccagcagagccagcctgctgacaggcctgccccagcaccagaatggcatgtatggcctgcaccaggatgtgcaccacttcaacagctttgacaaggtgagaagcctgcccctgctgctgagccaggctggggtgagaacaggcatcattggcaagaagcatgtgggccctgagacagtgtacccctttgactttgcctacacagaggagaatggcagtgtgctgcaggtgggcagaaacatcaccagaatcaagctgctggtgagaaagttcctgcagacccaggatgaccagcccttcttcctgtatgtggccttccatgacccccacagatgtggccacagccagccccagtatggcaccttctgtgagaagtttggcaatggggagagtggcatgggcagaatccctgactggaccccccaggcctatgaccccctggatgtgctggtgccctactttgtgcccaacacccctgctgccagagctgacctggctgcccagtacaccacagtgggcagaatggaccagggggtgggcctggtgctgcaggagctgagagatgctggggtgctgaatgacaccctggtgatcttcaccagtgacaatggcatccccttccccagtggcagaaccaacctgtactggcctggcacagctgagcccctgctggtgagcagccctgagcaccccaagagatggggccaggtgagtgaggcctatgtgagcctgctggacctgacccccaccatcctggactggttcagcatcccctaccccagctatgccatctttggcagcaagaccatccacctgacaggcagaagcctgctgcctgccctggaggctgagcccctgtgggccacagtgtttggcagccagagccaccatgaggtgaccatgagctaccccatgagaagtgtgcagcacagacacttcagactggtgcacaacctgaacttcaagatgcccttccccattgaccaggacttctatgtgagccccaccttccaggacctgctgaacagaaccacagctggccagcccacaggctggtacaaggacctgagacactactactacagagccagatgggagctgtatgacagaagcagagacccccatgagacccagaacctggccacagaccccagatttgcccagctgctggagatgctgagagaccagctggccaagtggcagtgggagacccatgacccctgggtgtgtgcccctgatggggtgctggaggagaagctgagcccccagtgccagcccctgcacaatgagctgtga

SEQ ID NO: 103 - DNA, 921 bp, Artificial Sequence
  Codon optimized Ceroid Lipofuscinosis, Neuronal, 1 (CLN1)
atggcttctccggggtgtctgtggctgctggcagtggcactccttccctggacttgcgccagccgggctctgcagcacctcgaccctccagcccctcttccactggtgatttggcacggaatgggtgattcctgctgtaatcccctgtcaatgggagccatcaagaagatggtggagaagaagatccctggaatctacgtgctgtcactggagattggaaagaccctgatggaggacgtcgagaactccttcttcctcaatgtcaactctcaagtgaccaccgtctgccaggccctggccaaggacccgaagctgcagcaggggtataatgctatggggttcagccagggaggacagttccttcgggctgtggcccaacgctgccctagcccacccatgatcaacctgatctcagtgggtggccagcatcagggcgtgttcggacttccccggtgtcccggggaatcctctcatatctgcgacttcatccgcaaaactctcaatgcaggcgcttattcaaaggtcgtccaagagaggctggtgcaagccgagtactggcacgatcccattaaggaggacgtgtacagaaatcactcaatctttctggccgacattaaccaggagaggggaattaacgaatcatataagaagaatctcatggccctcaaaaagttcgtcatggtgaagttccttaacgatagcattgtggacccagtggacagcgaatggttcggattttaccgctcaggccaggcaaaagaaaccatccctctccaagagacttctctttacacccaagacagacttgggcttaaggaaatggataacgctggtcagctggtgttcctcgccaccgaaggtgaccatctgcagctcagcgaagagtggttctacgctcatatcatcccgtttcttggttga

SEQ ID NO: 104 - DNA, 885 bp, Homo sapiens
  misc_feature (1)..(885): Survival Motor Neuron 1 (SMN1)
atggcgatgagcagcggcggcagtggtggcggcgtcccggagcaggaggattccgtgctgttccggcgcggcacaggccagagcgatgattctgacatttgggatgatacagcactgataaaagcatatgataaagctgtggcttcatttaagcatgctctaaagaatggtgacatttgtgaaacttcgggtaaaccaaaaaccacacctaaaagaaaacctgctaagaagaataaaagccaaaagaagaatactgcagcttccttacaacagtggaaagttggggacaaatgttctgccatttggtcagaagacggttgcatttacccagctaccattgcttcaattgattttaagagagaaacctgtgttgtggtttacactggatatggaaatagagaggagcaaaatctgtccgatctactttccccaatctgtgaagtagctaataatatagaacagaatgctcaagagaatgaaaatgaaagccaagtttcaacagatgaaagtgagaactccaggtctcctggaaataaatcagataacatcaagcccaaatctgctccatggaactcttttctccctccaccaccccccatgccagggccaagactgggaccaggaaagccaggtctaaaattcaatggcccaccaccgccaccgccaccaccaccaccccacttactatcatgctggctgcctccatttccttctggaccaccaataattcccccaccacctcccatatgtccagattctcttgatgatgctgatgctttgggaagtatgttaatttcatggtacatgagtggctatcatactggctattatatgggttttagacaaaatcaaaaagaaggaaggtgctcacattccttaaattaa

SEQ ID NO: 105 - DNA, 885 bp, Artificial Sequence
  Codon optimized CO1-SMN1
atggcgatgtctagtggtggatctggtggcggcgtgcccgagcaagaagatagcgtcctgttcagaagaggcaccggccagagcgacgacagcgacatctgggatgatacagccctgatcaaggcctacgacaaggccgtggccagctttaagcacgccctgaagaacggcgatatctgcgagacaagcggcaagcccaagaccacacctaagagaaagcccgccaagaagaacaagagccagaagaagaataccgccgccagcctgcagcagtggaaagtgggcgataagtgcagcgccatttggagcgaggacggctgtatctaccctgccacaatcgccagcatcgacttcaagcgggaaacctgcgtggtggtgtacacaggctacggcaacagagaggaacagaacctgagcgacctgctgtccccaatttgcgaggtggccaacaacatcgagcagaacgcccaagagaacgagaacgagtcccaggtgtccaccgacgagagcgagaatagcagaagccccggcaacaagagcgacaacatcaagcctaagagcgccccttggaacagcttcctgcctcctcctccaccaatgcctggacctagactcggacctggaaagcccggcctgaagttcaatggacctccaccaccgccaccacctccgcctccacatcttctgtcttgttggctgcctccatttcctagcggccctccaatcatcccgccacctccacctatctgccccgacagtctggatgatgctgatgccctgggctccatgctgatctcttggtacatgagcggctaccacaccggctactacatgggcttcagacagaaccagaaagagggccgttgcagccacagcctgaactga

SEQ ID NO: 106 - DNA, 885 bp, Artificial Sequence
  Codon optimized CO2-SMN1
atggccatgagcagtgggggcagtggaggaggggtgcctgagcaggaggacagtgtgctgttcagaagaggcacaggccagagtgatgacagtgacatctgggatgacacagccctgatcaaggcctatgacaaggctgtggccagcttcaagcatgccctgaagaatggggacatctgtgagaccagtggcaagcccaagaccacccccaagagaaagcctgccaagaagaacaagagccagaagaagaacacagctgccagcctgcagcagtggaaggtgggagacaagtgcagtgccatctggagtgaggatggctgcatctaccctgccaccattgccagcattgacttcaagagagagacctgtgtggtggtgtacacaggctatggcaacagagaggagcagaacctgagtgacctgctgagccccatctgtgaggtggccaacaacattgagcagaatgcccaggagaatgagaatgagagccaggtgagcacagatgagagtgagaacagcagaagccctggcaacaagagtgacaacatcaagcccaagagtgccccttggaacagcttcctgccacccccaccacccatgcctggccccagactgggccctggcaagcctggcctgaagttcaatggcccaccaccccctcctccaccaccccctccccacctgctgagctgctggctgccccccttccccagtggcccacccatcatcccacctcccccacccatctgccctgacagcctggatgatgctgatgccctgggcagcatgctgatcagctggtacatgagtggctaccacacaggctactacatgggcttcagacagaaccagaaggagggcagatgcagccacagcctgaactga

SEQ ID NO: 107 - DNA, 1548 bp, Homo sapiens
  misc_feature (1)..(1548): Tissue Non-specific Alkaline Phosphatase (TNALP)
atgatttcaccattcttagtactggccattggcacctgccttactaactcactagtgccagagaaagagaaagaccccaagtactggcgagaccaagcgcaagagacactgaaatatgccctggagcttcagaagctcaacaccaacgtggctaagaatgtcatcatgttcctgggagatgggatgggtgtctccacagtgacggctgcccgcatcctcaagggtcagctccaccacaaccctggggaggagaccaggctggagatggacaagttccccttcgtggccctctccaagacgtacaacaccaatgcccaggtccctgacagcgccggcaccgccaccgcctacctgtgtggggtgaaggccaatgagggcaccgtgggggtaagcgcagccactgagcgttcccggtgcaacaccacccaggggaacgaggtcacctccatcctgcgctgggccaaggacgctgggaaatctgtgggcattgtgaccaccacgagagtgaaccatgccacccccagcgccgcctacgcccactcggctgaccgggactggtactcagacaacgagatgccccctgaggccttgagccagggctgtaaggacatcgcctaccagctcatgcataacatcagggacattgacgtgatcatggggggtggccggaaatacatgtaccccaagaataaaactgatgtggagtatgagagtgacgagaaagccaggggcacgaggctggacggcctggacctcgttgacacctggaagagcttcaaaccgagatacaagcactcccacttcatctggaaccgcacggaactcctgacccttgacccccacaatgtggactacctattgggtctcttcgagccaggggacatgcagtacgagctgaacaggaacaacgtgacggacccgtcactctccgagatggtggtggtggccatccagatcctgcggaagaaccccaaaggcttcttcttgctggtggaaggaggcagaattgaccacgggcaccatgaaggaaaagccaagcaggccctgcatgaggcggtggagatggaccgggccatcgggcaggcaggcagcttgacctcctcggaagacactctgaccgtggtcactgcggaccattcccacgtcttcacatttggtggatacaccccccgtggcaactctatctttggtctggcccccatgctgagtgacacagacaagaagcccttcactgccatcctgtatggcaatgggcctggctacaaggtggtgggcggtgaacgagagaatgtctccatggtggactatgctcacaacaactaccaggcgcagtctgctgtgcccctgcgccacgagacccacggcggggaggacgtggccgtcttctccaagggccccatggcgcacctgctgcacggcgtccacgagcagaactacgtcccccacgtgatggcgtatgcagcctgcatcggggccaacctcggccactgtgctcctgccagctcggcaggatccgatgatgacgacgacgatgacgatgatgattga

SEQ ID NO: 108 - DNA, 1548 bp, Artificial Sequence
  Codon optimized, CO1-TNALP contains D10 tag at C end
atgatctctccatttctggtgctggccatcggcacctgtctgaccaactcactagtgcccgagaaagagaaggaccccaagtactggcgcgatcaggcccaagagacactgaagtacgccctggaactgcagaaactgaacaccaacgtggccaagaacgtgatcatgttcctcggcgacggcatgggcgtgtccacagttacagccgccagaatcctgaagggccagctgcaccataatcctggcgaagagacacggctggaaatggacaagttcccattcgtggccctgagcaagacctacaacaccaatgctcaggtgcccgattctgccggaacagccacagcttatctgtgcggcgtgaaggccaatgagggcaccgttggagtgtctgccgccaccgaaagatcccggtgcaataccacacagggcaacgaagtgaccagcatcctgagatgggccaaagacgccggcaagtctgtgggcatcgtgaccaccaccagagtgaaccacgccacacctagcgccgcctatgctcactctgccgacagagactggtacagcgacaacgagatgcctcctgaggctctgtctcagggctgcaaggatatcgcctaccagctgatgcacaacatccgggacattgatgtgatcatgggcggaggccggaagtacatgtatcccaagaacaagaccgacgtcgagtacgagagcgacgagaaggccagaggcacaagactggatggcctggacctggtggatacctggaagtccttcaagccccggtacaagcacagccacttcatctggaaccggaccgagctgctgacactggaccctcacaatgtggactacctgctgggcctgttcgagcccggcgatatgcagtacgagctgaaccggaacaacgtgacagaccccagcctgagcgagatggtggttgtggccattcagatcctgcggaagaaccccaagggattcttcctgctggtggaaggcggcaggatcgatcacggacaccatgagggaaaagccaagcaggccctgcacgaggccgtcgaaatggatagagccattggccaggccggcagcctgacaagctctgaggatacactgaccgtggtcaccgccgatcacagccacgtgttcacattcggcggctacacccctagaggcaacagcatctttggactggcccctatgctgagcgacaccgacaagaagcctttcaccgccatcctgtacggcaacggccctggctataaggttgtcggaggcgagagggaaaacgtgtccatggtggattacgcccacaacaactaccaggctcagagcgccgtgcctctgagacacgaaacacacggcggagaagatgtggccgtgttcagcaagggccccatggctcatctgctgcatggcgtgcacgagcagaattacgtgccacacgtgatggcctacgccgcctgtattggagccaatctgggacattgtgcccctgccagtagcgccggatccgacgatgatgacgacgacgatgacgatgactga

SEQ ID NO: 109 - DNA, 1548 bp, Artificial Sequence
  Codon optimized, CO2-TNALP contains D10 tag at C end
atgatcagccccttcctggtgctggccattggcacctgcctgaccaacagcctggtgcctgagaaggagaaggaccccaagtactggagagaccaggcccaggagaccctgaagtatgccctggagctgcagaagctgaacaccaatgtggccaagaatgtgatcatgttcctgggggatggcatgggggtgagcacagtgacagctgccagaatcctgaagggccagctgcaccacaaccctggggaggagaccagactggagatggacaagttcccctttgtggccctgagcaagacctacaacaccaatgcccaggtgcctgacagtgctggcacagccacagcctacctgtgtggggtgaaggccaatgagggcacagtgggggtgagtgctgccacagagagaagcagatgcaacaccacccagggcaatgaggtgaccagcatcctgagatgggccaaggatgctggcaagagtgtgggcattgtgaccaccaccagagtgaaccatgccacccccagtgctgcctatgcccacagtgctgacagagactggtacagtgacaatgagatgccccctgaggccctgagccagggctgcaaggacattgcctaccagctgatgcacaacatcagagacattgatgtgatcatgggggggggcagaaagtacatgtaccccaagaacaagacagatgtggagtatgagagtgatgagaaggccagaggcaccagactggatggcctggacctggtggacacctggaagagcttcaagcccagatacaagcacagccacttcatctggaacagaacagagctgctgaccctggacccccacaatgtggactacctgctgggcctgtttgagcctggggacatgcagtatgagctgaacagaaacaatgtgacagaccccagcctgagtgagatggtggtggtggccatccagatcctgagaaagaaccccaagggcttcttcctgctggtggaggggggcagaattgaccatggccaccatgagggcaaggccaagcaggccctgcatgaggctgtggagatggacagagccattggccaggctggcagcctgaccagcagtgaggacaccctgacagtggtgacagctgaccacagccatgtgttcacctttgggggctacacccccagaggcaacagcatctttggcctggcccccatgctgagtgacacagacaagaagcccttcacagccatcctgtatggcaatggccctggctacaaggtggtggggggggagagagagaatgtgagcatggtggactatgcccacaacaactaccaggcccagagtgctgtgcccctgagacatgagacccatgggggggaggatgtggctgtgttcagcaagggccccatggcccacctgctgcatggggtgcatgagcagaactatgtgccccatgtgatggcctatgctgcctgcattggggccaacctgggccactgtgcccctgccagcagtgctggatccgatgatgatgatgatgatgatgatgatgactga

SEQ ID NO: 110 - DNA, 636 bp, Homo sapiens
  misc_feature (1)..(636): Glial Cell Derived Neurotrophic Factor (GDNF)
atgaagttatgggatgtcgtggctgtctgcctggtgctgctccacaccgcgtccgccttcccgctgcccgccggcaagaggcctcccgaggcgcccgccgaagaccgctccctcggccgccgccgcgcgcccttcgcgctgagcagtgactcaaatatgccagaggattatcctgatcagttcgatgatgtcatggattttattcaagccaccattaaaagactgaaaaggtcaccagataaacaaatggcagtgcttcctagaagagagcggaatcggcaggctgcagctgccaacccagagaattccagaggaaaaggtcggagaggccagaggggcaaaaaccggggttgtgtcttaactgcaatacatttaaatgtcactgacttgggtctgggctatgaaaccaaggaggaactgatttttaggtactgcagcggctcttgcgatgcagctgagacaacgtacgacaaaatattgaaaaacttatccagaaatagaaggctggtgagtgacaaagtagggcaggcatgttgcagacccatcgcctttgatgatgacctgtcgtttttagatgataacctggtttaccatattctaagaaagcattccgctaaaaggtgtggatgtatctaa

SEQ ID NO: 111 - DNA, 1611 bp, Homo sapiens
  misc_feature (1)..(1611): Tissue Glucosyl Ceramidase beta (GBA1)
atggagttttcaagtccttccagagaggaatgtcccaagcctttgagtagggtaagcatcatggctggcagcctcacaggattgcttctacttcaggcagtgtcgtgggcatcaggtgcccgcccctgcatccctaaaagcttcggctacagctcggtggtgtgtgtctgcaatgccacatactgtgactcctttgaccccccgacctttcctgcccttggtaccttcagccgctatgagagtacacgcagtgggcgacggatggagctgagtatggggcccatccaggctaatcacacgggcacaggcctgctactgaccctgcagccagaacagaagttccagaaagtgaagggatttggaggggccatgacagatgctgctgctctcaacatccttgccctgtcaccccctgcccaaaatttgctacttaaatcgtacttctctgaagaaggaatcggatataacatcatccgggtaccaatggccagctgtgacttctccatccgcacctacacctatgcagacacccctgatgatttccagttgcacaacttcagcctcccagaggaagataccaagctcaagatacccctgattcaccgagccctgcagttggcccagcgtcccgtttcactccttgccagcccctggacatcacccacttggctcaagaccaatggagcggtgaatgggaaggggtcactcaagggacagcccggagacatctaccaccagacctgggccagatactttgtgaagttcctggatgcctatgctgagcacaagttacagttctgggcagtgacagctgaaaatgagccttctgctgggctgttgagtggataccccttccagtgcctgggcttcacccctgaacatcagcgagacttcattgcccgtgacctaggtcctaccctcgccaacagtactcaccacaatgtccgcctactcatgctggatgaccaacgcttgctgctgccccactgggcaaaggtggtactgacagacccagaagcagctaaatatgttcatggcattgctgtacattggtacctggactttctggctccagccaaagccaccctaggggagacacaccgcctgttccccaacaccatgctctttgcctcagaggcctgtgtgggctccaagttctgggagcagagtgtgcggctaggctcctgggatcgagggatgcagtacagccacagcatcatcacgaacctcctgtaccatgtggtcggctggaccgactggaaccttgccctgaaccccgaaggaggacccaattgggtgcgtaactttgtcgacagtcccatcattgtagacatcaccaaggacacgttttacaaacagcccatgttctaccaccttggccacttcagcaagttcattcctgagggctcccagagagtggggctggttgccagtcagaagaacgacctggacgcagtggcactgatgcatcccgatggctctgctgttgtggtcgtgctaaaccgctcctctaaggatgtgcctcttaccatcaaggatcctgctgtgggcttcctggagacaatctcacctggctactccattcacacctacctgtggcgtcgccagtga

SEQ ID NO: 112 - DNA, 1611 bp, Artificial Sequence
  Codon optimized CO1-GBA1
atggagttcagcagccccagcagagaggagtgccccaagcccctgagcagagtgagcatcatggctggcagcctgacaggcctgctgctgctgcaggctgtgagctgggccagtggggccagaccctgcatccccaagagctttggctacagcagtgtggtgtgtgtgtgcaatgccacctactgtgacagctttgacccccccaccttccctgccctgggcaccttcagcagatatgagagcaccagaagtggcagaagaatggagctgagcatgggccccatccaggccaaccacacaggcacaggcctgctgctgaccctgcagcctgagcagaagttccagaaggtgaagggctttgggggggccatgacagatgctgctgccctgaacatcctggccctgagcccccctgcccagaacctgctgctgaagagctacttcagtgaggagggcattggctacaacatcatcagagtgccaatggccagctgtgacttcagcatcagaacctacacctatgctgacacccctgatgacttccagctgcacaacttcagcctgcctgaggaggacaccaagctgaagatccccctgatccacagagccctgcagctggcccagagacctgtgagcctgctggccagcccctggaccagccccacctggctgaagaccaatggggctgtgaatggcaagggcagcctgaagggccagcctggggacatctaccaccagacctgggccagatactttgtgaagttcctggatgcctatgctgagcacaagctgcagttctgggctgtgacagctgagaatgagcccagtgctggcctgctgagtggctaccccttccagtgcctgggcttcacccctgagcaccagagagacttcattgccagagacctgggccccaccctggccaacagcacccaccacaatgtgagactgctgatgctggatgaccagagactgctgctgccccactgggccaaggtggtgctgacagaccctgaggctgccaagtatgtgcatggcattgctgtgcactggtacctggacttcctggcccctgccaaggccaccctgggggagacccacagactgttccccaacaccatgctgtttgccagtgaggcctgtgtgggcagcaagttctgggagcagagtgtgagactgggcagctgggacagaggcatgcagtacagccacagcatcatcaccaacctgctgtaccatgtggtgggctggacagactggaacctggccctgaaccctgaggggggccccaactgggtgagaaactttgtggacagccccatcattgtggacatcaccaaggacaccttctacaagcagcccatgttctaccacctgggccacttcagcaagttcatccctgagggcagccagagagtgggcctggtggccagccagaagaatgacctggatgctgtggccctgatgcaccctgatggcagtgctgtggtggtggtgctgaacagaagcagcaaggatgtgcccctgaccatcaaggaccctgctgtgggcttcctggagaccatcagccctggctacagcatccacacctacctgtggagaagacagtga

SEQ ID NO: 113 - DNA, 1611 bp, Artificial Sequence
  Codon optimized CO2-GBA1
atggagtttagcagccctagcagagaggaatgccccaagcctctgagccgggtgtcaatcatggccggatctctgacaggactgctgctgcttcaggccgtgtcttgggcttctggcgctagaccttgcatccccaagagcttcggctacagcagcgtcgtgtgcgtgtgcaatgccacctactgcgacagcttcgaccctcctacctttcctgctctgggcaccttcagcagatacgagagcaccagatccggcagacggatggaactgagcatgggacccatccaggccaatcacacaggcactggcctgctgctgacactgcagcctgagcagaaattccagaaagtgaaaggcttcggcggagccatgacagatgccgccgctctgaatatcctggctctgtctccaccagctcagaacctgctgctcaagagctacttcagcgaggaaggcatcggctacaacatcatccgggtgccaatggccagctgcgacttcagcatccggacctacacctacgccgacacacccgacgatttccagctgcacaacttcagcctgcctgaagaggacaccaagctgaagatccctctgatccacagagccctgcagctggcacaaagacccgtttctctgctggctagcccctggacatctcccacctggctgaaaacaaatggcgccgtgaatggcaagggcagcctgaaaggccaacctggcgatatctaccaccagacctgggccagatacttcgtgaagttcctggacgcctatgccgagcacaagctgcagttttgggccgtgacagccgagaacgaaccttctgctggactgctgagcggctacccctttcagtgcctgggctttacacccgagcaccagcgggactttatcgccagagatctgggacccacactggccaatagcacccaccataatgtgcggctgctgatgctggacgaccagagactgcttctgccccactgggctaaagtggtgctgacagatcctgaggccgccaaatacgtgcacggaatcgccgtgcactggtatctggactttctggcccctgccaaggccacactgggagagacacacagactgttccccaacaccatgctgttcgccagcgaagcctgtgtgggcagcaagttttgggaacagagcgtgcggctcggcagctgggatagaggcatgcagtacagccacagcatcatcaccaacctgctgtaccacgtcgtcggctggaccgactggaatctggccctgaatcctgaaggcggccctaactgggtccgaaacttcgtggacagccccatcatcgtggacatcaccaaggacaccttctacaagcagcccatgttctaccacctgggacacttcagcaagttcatccccgagggctctcagcgcgttggactggtggccagccagaagaatgatctggacgccgtggctctgatgcaccctgatggatctgctgtggtggtggtcctgaaccgcagcagcaaagatgtgcccctgaccatcaaggatcccgccgtgggattcctggaaacaatcagccctggctactccatccacacctacctgtggcggagacagtga

SEQ ID NO: 114 - DNA, 1962 bp, Homo sapiens
  misc_feature (1)..(1962): Iduronidase alpha-L- (IDUA)
atgcgtcccctgcgcccccgcgccgcgctgctggcgctcctggcctcgctcctggccgcgcccccggtggccccggccgaggccccgcacctggtgcatgtggacgcggcccgcgcgctgtggcccctgcggcgcttctggaggagcacaggcttctgccccccgctgccacacagccaggctgaccagtacgtcctcagctgggaccagcagctcaacctcgcctatgtgggcgccgtccctcaccgcggcatcaagcaggtccggacccactggctgctggagcttgtcaccaccagggggtccactggacggggcctgagctacaacttcacccacctggacgggtacctggaccttctcagggagaaccagctcctcccagggtttgagctgatgggcagcgcctcgggccacttcactgactttgaggacaagcagcaggtgtttgagtggaaggacttggtctccagcctggccaggagatacatcggtaggtacggactggcgcatgtttccaagtggaacttcgagacgtggaatgagccagaccaccacgactttgacaacgtctccatgaccatgcaaggcttcctgaactactacgatgcctgctcggagggtctgcgcgccgccagccccgccctgcggctgggaggccccggcgactccttccacaccccaccgcgatccccgctgagctggggcctcctgcgccactgccacgacggtaccaacttcttcactggggaggcgggcgtgcggctggactacatctccctccacaggaagggtgcgcgcagctccatctccatcctggagcaggagaaggtcgtcgcgcagcagatccggcagctcttccccaagttcgcggacacccccatttacaacgacgaggcggacccgctggtgggctggtccctgccacagccgtggagggcggacgtgacctacgcggccatggtggtgaaggtcatcgcgcagcatcagaacctgctactggccaacaccacctccgccttcccctacgcgctcctgagcaacgacaatgccttcctgagctaccacccgcaccccttcgcgcagcgcacgctcaccgcgcgcttccaggtcaacaacacccgcccgccgcacgtgcagctgttgcgcaagccggtgctcacggccatggggctgctggcgctgctggatgaggagcagctctgggccgaagtgtcgcaggccgggaccgtcctggacagcaaccacacggtgggcgtcctggccagcgcccaccgcccccagggcccggccgacgcctggcgcgccgcggtgctgatctacgcgagcgacgacacccgcgcccaccccaaccgcagcgtcgcggtgaccctgcggctgcgcggggtgccccccggcccgggcctggtctacgtcacgcgctacctggacaacgggctctgcagccccgacggcgagtggcggcgcctgggccggcccgtcttccccacggcagagcagttccggcgcatgcgcgcggctgaggacccggtggccgcggcgccccgccccttacccgccggcggccgcctgaccctgcgccccgcgctgcggctgccgtcgcttttgctggtgcacgtgtgtgcgcgccccgagaagccgcccgggcaggtcacgcggctccgcgccctgcccctgacccaagggcagctggttctggtctggtcggatgaacacgtgggctccaagtgcctgtggacatacgagatccagttctctcaggacggtaaggcgtacaccccggtcagcaggaagccatcgaccttcaacctctttgtgttcagcccagacacaggtgctgtctctggctcctaccgagttcgagccctggactactgggcccgaccaggccccttctcggaccctgtgccgtacctggaggtccctgtgccaagagggcccccatccccgggcaatccatga

SEQ ID NO: 115 - DNA, 1962 bp, Artificial Sequence
  Codon optimized CO1-IDUA
atgagacccctgagacccagagctgccctgctggccctgctggccagcctgctggctgccccccctgtggcccctgctgaggccccccaccttgtacatgtggatgctgccagagccctgtggcccctgagaagattctggagaagcacaggcttctgcccccccctgccccacagccaggctgaccagtatgtgctgagctgggaccagcagctgaacctggcctatgtgggggctgtgccccacagaggcatcaagcaggtgagaacccactggctgctggagctggtgaccaccagaggcagcacaggcagaggcctgagctacaacttcacccacctggatggctacctggacctgctgagagagaaccagctgctgcctggctttgagctgatgggcagtgccagtggccacttcacagactttgaggacaagcagcaggtgtttgagtggaaggacctggtgagcagcctggccagaagatacattggcagatatggcctggcccatgtgagcaagtggaactttgagacctggaatgagcctgaccaccatgactttgacaatgtgagcatgaccatgcagggcttcctgaactactatgatgcctgcagtgagggcctgagagctgccagccctgccctgagactggggggccctggggacagcttccacaccccccccagaagccccctgagctggggcctgctgagacactgccatgatggcaccaacttcttcacaggggaggctggggtgagactggactacatcagcctgcacagaaagggggccagaagcagcatcagcatcctggagcaggagaaggtggtggcccagcagatcagacagctgttccccaagtttgctgacacccccatctacaatgatgaggctgaccccctggtgggctggagcctgccccagccctggagagctgatgtgacctatgctgccatggtggtgaaggtgattgcccagcaccagaacctgctgctggccaacaccaccagtgccttcccctatgccctgctgagcaatgacaatgccttcctgagctaccacccccacccctttgcccagagaaccctgacagccagattccaggtgaacaacaccagacccccccatgtgcagctgctgagaaagcctgtgctgacagccatgggcctgctggccctgctggatgaggagcagctgtgggctgaggtgagccaggctggcacagtgctggacagcaaccacacagtgggggtgctggccagtgcccacagaccccagggccctgctgatgcctggagagctgctgtgctgatctatgccagtgatgacaccagagcccaccccaacagaagtgtggctgtgaccctgagactgagaggggtgccccctggccctggcctggtgtatgtgaccagatacctggacaatggcctgtgcagccctgatggggagtggagaagactgggcagacctgtgttccccacagctgagcagttcagaagaatgagagctgctgaggaccctgtggctgctgcccccagacccctgcctgctgggggcagactgaccctgagacctgccctgagactgcccagcctgctgctggtgcatgtgtgtgccagacctgagaagccccctggccaggtgaccagactgagagccctgcccctgacccagggccagctggtgctggtgtggagtgatgagcatgtgggcagcaagtgcctgtggacctatgagatccagttcagccaggatggcaaggcctacacccctgtgagcagaaagcccagcaccttcaacctgtttgtgttcagccctgacacaggggctgtgagtggcagctacagagtgagagccctggactactgggccagacctggccccttcagtgaccctgtgccctacctggaggtgcctgtgcccagaggcccccccagccctggcaacccctga

SEQ ID NO: 116 - DNA, 1578 bp, Homo sapiens
  misc_feature (1)..(1578): Cytochrome P450 family 4 subfamily V member 2 (CYP4V2)
atggcggggctctggctggggctcgtgtggcagaagctgctgctgtggggcgcggcgagtgccctttccctggccggcgccagtctggtcctgagcctgctgcagagggtggcgagctacgcgcggaaatggcagcagatgcggcccatccccacggtggcccgcgcctacccactggtgggccacgcgctgctgatgaagccggacgggcgagaattttttcagcagatcattgagtacacagaggaataccgccacatgccgctgctgaagctctgggtcgggccagtgcccatggtggccctttataatgcagaaaatgtggaggtaattttaactagttcaaagcaaattgacaaatcctctatgtacaagtttttagaaccatggcttggcctaggacttcttacaagtactggaaacaaatggcgctccaggagaaagatgttaacacccactttccattttaccattctggaagatttcttagatatcatgaatgaacaagcaaatatattggttaagaaacttgaaaaacacattaaccaagaagcatttaactgctttttttacatcactctttgtgccttagatatcatctgtgaaacagctatggggaagaatattggtgctcaaagtaatgatgattccgagtatgtccgtgcagtttatagaatgagtgagatgatatttcgaagaataaagatgccctggctttggcttgatctctggtatcttatgtttaaagaaggatgggaacacaaaaagagccttcagatcctacatacttttaccaacagtgtcatcgctgaacgggccaatgaaatgaacgccaatgaagactgtagaggtgatggcaggggctctgccccctccaaaaataaacgcagggcctttcttgacttgcttttaagtgtgactgatgacgaagggaacaggctaagtcatgaagatattcgagaagaagttgacaccttcatgtttgaggggcacgatacaactgcagctgcaataaactggtccttatacctgttgggttctaacccagaagtccagaaaaaagtggatcatgaattggatgacgtgtttgggaagtctgaccgtcccgctacagtagaagacctgaagaaacttcggtatctggaatgtgttattaaggagacccttcgcctttttccttctgttcctttatttgcccgtagtgttagtgaagattgtgaagtggcaggttacagagttctaaaaggcactgaagccgtcatcattccctatgcattgcacagagatccgagatacttccccaaccccgaggagttccagcctgagcggttcttccccgagaatgcacaagggcgccatccatatgcctacgtgcccttctctgctggccccaggaactgtataggtcaaaagtttgctgtgatggaagaaaagaccattctttcgtgcatcctgaggcacttttggatagaatccaaccagaaaagagaagagcttggtctagaaggacagttgattcttcgtccaagtaatggcatctggatcaagttgaagaggagaaatgcagatgaacgctaa

SEQ ID NO: 117 - DNA, 711 bp, Homo sapiens
  misc_feature (1)..(711): Retinoschisin 1 (RS1)
atgagccgcaagatagaaggctttttgttattacttctctttggctatgaagccacattgggattatcgtctaccgaggatgaaggcgaggacccctggtatcaaaaagcatgcgatgaaggcgaggacccctggtatcaaaaagcatgcaagtgcgattgccaaggaggacccaatgctctgtggtctgcaggtgccacctccttggactgtataccagaatgcccatatcacaagcctctgggtttcgagtcaggggaggtcacaccggaccagatcacctgctctaacccggagcagtatgtgggctggtattcttcgtggactgcaaacaaggcccggctcaacagtcaaggctttgggtgtgcctggctctccaagttccaggacagtagccagtggttacagatagatctgaaggagatcaaagtgatttcagggatcctcacccaggggcgctgtgacatcgatgagtggatgaccaagtacagcgtgcagtacaggaccgatgagcgcctgaactggatttactacaaggaccagactggaaacaaccgggtcttctatggcaactcggaccgcacctccacggttcagaacctgctgcggccccccatcatctcccgcttcatccgcctcatcccgctgggctggcacgtccgcattgccatccggatggagctgctggagtgcgtcagcaagtgtgcctga

SEQ ID NO: 118 - DNA, 2565 bp, Homo sapiens
  misc_feature (1)..(2565): Phosphodiesterase 6B (PDE6B)
atgagcctcagtgaggagcaggcccggagctttctggaccagaaccccgattttgcccgccagtactttgggaagaaactgagccctgagaatgtggccgcggcctgcgaggacgggtgcccgccggactgcgacagcctccgggacctctgccaggtggaggagagcacggcgctgctggagctggtgcaggatatgcaggagagcatcaacatggagcgcgtggtcttcaaggtcctgcggcgcctctgcaccctgctgcaggccgaccgctgcagcctcttcatgtaccgccagcgcaacggcgtggccgagctggccaccaggcttttcagcgtgcagccggacagcgtcctggaggactgcctggtgccccccgactccgagatcgtcttcccactggacatcggggtcgtgggccacgtggctcagaccaaaaagatggtgaacgtcgaggacgtggccgagtgccctcacttcagctcatttgctgacgagctcactgactacaagacaaagaatatgctggccacacccatcatgaatggcaaagacgtcgtggcggtgatcatggcagtgaacaagctcaacggcccattcttcaccagcgaagacgaagatgtgttcttgaagtacctgaattttgccacgttgtacctgaaaatctatcacctgagctacctccacaactgcgagacgcgccgcggccaggtgctgctgtggtcggccaacaaggtgtttgaggagctgacggacatcgagaggcagttccacaaggccttctacacggtgcgggcctacctcaactgcgagcggtactccgtgggcctcctggacatgaccaaggagaaggaattttttgacgtgtggtctgtgctgatgggagagtcccagccgtactcgggcccacgcacgcctgatggccgggaaattgtcttctacaaagtgatcgactacatcctccacggcaaggaggagatcaaggtcattcccacaccctcagccgatcactgggccctggccagcggccttccaagctacgtggcagaaagcggctttatttgtaacatcatgaatgcttccgctgacgaaatgttcaaatttcaggaaggggccctggacgactccgggtggctcatcaagaatgtgctgtccatgcccatcgtcaacaagaaggaggagattgtgggagtcgccacattttacaacaggaaagacgggaagccctttgacgaacaggacgaggttctcatggagtccctgacacagttcctgggctggtcagtgatgaacaccgacacctacgacaagatgaacaagctggagaaccgcaaggacatcgcacaggacatggtcctttaccacgtgaagtgcgacagggacgagatccagctcatcctgccaaccagagcgcgcctggggaaggagcctgctgactgcgatgaggacgagctgggcgaaatcctgaaggaggagctgccagggcccaccacatttgacatctacgaattccacttctctgacctggagtgcaccgaactggacctggtcaaatgtggcatccagatgtactacgagctgggcgtggtccgaaagttccagatcccccaggaggtcctggtgcggttcctgttctccatcagcaaaggctaccggagaatcacctaccacaactggcgccacggcttcaacgtggcccagacgatgttcacgctgctcatgaccggcaaactgaagagctactacacggacctggaggccttcgccatggtgacagccggcctgtgccatgacatcgaccaccgcggcaccaacaacctgtaccagatgaagtcccagaaccccttggctaaactccacggctcctcgattttggagcggcaccacctggagtttgggaagttcctgctctcggaggagaccctgaacatctaccagaacctgaaccggcggcagcacgagcacgtgatccacctgatggacatcgccatcatcgccacggacctggccctgtacttcaagaagagagcgatgtttcagaagatcgtggatgagtccaagaactaccaggacaagaagagctgggtggagtacctgtccctggagacgacccggaaggagatcgtcatggccatgatgatgacagcctgcgacctgtctgccatcaccaagccctgggaagtccagagcaaggtcgcacttctcgtggctgctgagttctgggagcaaggtgacttggaaaggacagtcttggatcagcagcccattcctatgatggaccggaacaaggcggccgagctccccaagctgcaagtgggcttcatcgacttcgtgtgcacattcgtgtacaaggagttctctcgtttccacgaagagatcctgcccatgttcgaccgactgcagaacaataggaaagagtggaaggcgctggctgatgagtatgaggccaaagtgaaggctctggaggagaaggaggaggaggagagggtggcagccaagaaagtaggcacagaaatttgcaatggcggcccagcacccaagtcttcaacctgctgtatcctgtga

SEQ ID NO: 119 - DNA, 1497 bp, Homo sapiens
  misc_feature (1)..(1497): Methyl-CpG Binding Protein (MeCP2)
atggccgccgccgccgccgccgcgccgagcggaggaggaggaggaggcgaggaggagagactggaagaaaagtcagaagaccaggacctccagggcctcaaggacaaacccctcaagtttaaaaaggtgaagaaagataagaaagaagagaaagagggcaagcatgagcccgtgcagccatcagcccaccactctgctgagcccgcagaggcaggcaaagcagagacatcagaagggtcaggctccgccccggctgtgccggaagcttctgcctcccccaaacagcggcgctccatcatccgtgaccggggacccatgtatgatgaccccaccctgcctgaaggctggacacggaagcttaagcaaaggaaatctggccgctctgctgggaagtatgatgtgtatttgatcaatccccagggaaaagcctttcgctctaaagtggagttgattgcgtacttcgaaaaggtaggcgacacatccctggaccctaatgattttgacttcacggtaactgggagagggagcccctcccggcgagagcagaaaccacctaagaagcccaaatctcccaaagctccaggaactggcagaggccggggacgccccaaagggagcggcaccacgagacccaaggcggccacgtcagagggtgtgcaggtgaaaagggtcctggagaaaagtcctgggaagctccttgtcaagatgccttttcaaacttcgccagggggcaaggctgaggggggtggggccaccacatccacccaggtcatggtgatcaaacgccccggcaggaagcgaaaagctgaggccgaccctcaggccattcccaagaaacggggccgaaagccggggagtgtggtggcagccgctgccgccgaggccaaaaagaaagccgtgaaggagtcttctatccgatctgtgcaggagaccgtactccccatcaagaagcgcaagacccgggagacggtcagcatcgaggtcaaggaagtggtgaagcccctgctggtgtccaccctcggtgagaagagcgggaaaggactgaagacctgtaagagccctgggcggaaaagcaaggagagcagccccaaggggcgcagcagcagcgcctcctcaccccccaagaaggagcaccaccaccatcaccaccactcagagtccccaaaggcccccgtgccactgctcccacccctgcccccacctccacctgagcccgagagctccgaggaccccaccagcccccctgagccccaggacttgagcagcagcgtctgcaaagaggagaagatgcccagaggaggctcactggagagcgacggctgccccaaggagccagctaagactcagcccgcggttgccaccgccgccacggccgcagaaaagtacaaacaccgaggggagggagagcgcaaagacattgtttcatcctccatgccaaggccaaacagagaggagcctgtggacagccggacgcccgtgaccgagagagttagctag

SEQ ID NO: 120 - DNA, 2232 bp, Homo sapiens
  misc_feature (1)..(2232): N-acetyl-alpha-glucosaminidase (NAGLU)
atggaggcggtggcggtggccgcggcggtgggggtccttctcctggccggggccgggggcgcggcaggcgacgaggcccgggaggcggcggccgtgcgggcgctcgtggcccggctgctggggccaggccccgcggccgacttctccgtgtcggtggagcgcgctctggctgccaagccgggcttggacacctacagcctgggcggcggcggcgcggcgcgcgtgcgggtgcgcggctccacgggcgtggcggccgccgcggggctgcaccgctacctgcgcgacttctgtggctgccacgtggcctggtccggctctcagctgcgcctgccgcggccactgccagccgtgccgggggagctgaccgaggccacgcccaacaggtaccgctattaccagaatgtgtgcacgcaaagctactccttcgtgtggtgggactgggcccgctgggagcgagagatagactggatggcgctgaatggcatcaacctggcactggcctggagcggccaggaggccatctggcagcgggtgtacctggccttgggcctgacccaggcagagatcaatgagttctttactggtcctgccttcctggcctgggggcgaatgggcaacctgcacacctgggatggccccctgcccccctcctggcacatcaagcagctttacctgcagcaccgggtcctggaccagatgcgctccttcggcatgaccccagtgctgcctgcattcgcggggcatgttcccgaggctgtcaccagggtgttccctcaggtcaatgtcacgaagatgggcagttggggccactttaactgttcctactcctgctccttccttctggctccggaagaccccatattccccatcatcgggagcctcttcctgcgagagctgatcaaagagtttggcacagaccacatctatggggccgacactttcaatgagatgcagccaccttcctcagagccctcctaccttgccgcagccaccactgccgtctatgaggccatgactgcagtggatactgaggctgtgtggctgctccaaggctggctcttccagcaccagccgcagttctgggggcccgcccagatcagggctgtgctgggagctgtgccccgtggccgcctcctggttctggacctgtttgctgagagccagcctgtgtatacccgcactgcctccttccagggccagcccttcatctggtgcatgctgcacaactttgggggaaaccatggtctttttggagccctagaggctgtgaacggaggcccagaagctgcccgcctcttccccaactccaccatggtaggcacgggcatggcccccgagggcatcagccagaacgaagtggtctattccctcatggctgagctgggctggcgaaaggacccagtgccagatttggcagcctgggtgaccagctttgccgcccggcggtatggggtctcccacccggacgcaggggcagcgtggaggctactgctccggagtgtgtacaactgctccggggaggcctgcaggggccacaatcgtagcccgctggtcaggcggccgtccctacagatgaataccagcatctggtacaaccgatctgatgtgtttgaggcctggcggctgctgctcacatctgctccctccctggccaccagccccgccttccgctacgacctgctggacctcactcggcaggcagtgcaggagctggtcagcttgtactatgaggaggcaagaagcgcctacctgagcaaggagctggcctccctgttgagggctggaggcgtcctggcctatgagctgctgccggcactggacgaggtgctggctagtgacagccgcttcttgctgggcagctggctagagcaggcccgagcagcggcagtcagtgaggccgaggccgatttctacgagcagaacagccgctaccagctgaccttgtgggggccagaaggcaacatcctggactatgccaacaagcagctggcggggttggtggccaactactacacccctcgctggcggcttttcctggaggcgctggttgacagtgtggcccagggcatccctttccaacagcaccagtttgacaaaaatgtcttccaactggagcaggccttcgttctcagcaagcagaggtaccccagccagccgcgaggagacactgtggacctggccaagaagatcttcctcaaatattaccccggctgggtggccggctcttggtga

SEQ ID NO: 121 - DNA, 1317 bp, Homo sapiens; identical to SEQ ID NO: 12
  misc_feature (1)..(1317): Ceroid Lipofuscinosis, Neuronal 3 (CLN3)

SEQ ID NO: 122 - DNA, 1317 bp, Artificial Sequence; identical to SEQ ID NO: 13
  Codon optimized CO1-CLN3

SEQ ID NO: 123 - DNA, 2859 bp, Homo sapiens
  misc_feature (1)..(2859): Acid Alpha-Glucosidase (GAA)
atgggagtgaggcacccgccctgctcccaccggctcctggccgtctgcgccctcgtgtccttggcaaccgctgcactcctggggcacatcctactccatgatttcctgctggttccccgagagctgagtggctcctccccagtcctggaggagactcacccagctcaccagcagggagccagcagaccagggccccgggatgcccaggcacaccccggccgtcccagagcagtgcccacacagtgcgacgtcccccccaacagccgcttcgattgcgcccctgacaaggccatcacccaggaacagtgcgaggcccgcggctgttgctacatccctgcaaagcaggggctgcagggagcccagatggggcagccctggtgcttcttcccacccagctaccccagctacaagctggagaacctgagctcctctgaaatgggctacacggccaccctgacccgtaccacccccaccttcttccccaaggacatcctgaccctgcggctggacgtgatgatggagactgagaaccgcctccacttcacgatcaaagatccagctaacaggcgctacgaggtgcccttggagaccccgcatgtccacagccgggcaccgtccccactctacagcgtggagttctccgaggagcccttcggggtgatcgtgcgccggcagctggacggccgcgtgctgctgaacacgacggtggcgcccctgttctttgcggaccagttccttcagctgtccacctcgctgccctcgcagtatatcacaggcctcgccgagcacctcagtcccctgatgctcagcaccagctggaccaggatcaccctgtggaaccgggaccttgcgcccacgcccggtgcgaacctctacgggtctcaccctttctacctggcgctggaggacggcgggtcggcacacggggtgttcctgctaaacagcaatgccatggatgtggtcctgcagccgagccctgcccttagctggaggtcgacaggtgggatcctggatgtctacatcttcctgggcccagagcccaagagcgtggtgcagcagtacctggacgttgtgggatacccgttcatgccgccatactggggcctgggcttccacctgtgccgctggggctactcctccaccgctatcacccgccaggtggtggagaacatgaccagggcccacttccccctggacgtccagtggaacgacctggactacatggactcccggagggacttcacgttcaacaaggatggcttccgggacttcccggccatggtgcaggagctgcaccagggcggccggcgctacatgatgatcgtggatcctgccatcagcagctcgggccctgccgggagctacaggccctacgacgagggtctgcggaggggggttttcatcaccaacgagaccggccagccgctgattgggaaggtatggcccgggtccactgccttccccgacttcaccaaccccacagccctggcctggtgggaggacatggtggctgagttccatgaccaggtgcccttcgacggcatgtggattgacatgaacgagccttccaacttcatcaggggctctgaggacggctgccccaacaatgagctggagaacccaccctacgtgcctggggtggttggggggaccctccaggcggccaccatctgtgcctccagccaccagtttctctccacacactacaacctgcacaacctctacggcctgaccgaagccatcgcctcccacagggcgctggtgaaggctcgggggacacgcccatttgtgatctcccgctcgacctttgctggccacggccgatacgccggccactggacgggggacgtgtggagctcctgggagcagctcgcctcctccgtgccagaaatcctgcagtttaacctgctgggggtgcctctggtcggggccgacgtctgcggcttcctgggcaacacctcagaggagctgtgtgtgcgctggacccagctgggggccttctaccccttcatgcggaaccacaacagcctgctcagtctgccccaggagccgtacagcttcagcgagccggcccagcaggccatgaggaaggccctcaccctgcgctacgcactcctcccccacctctacacactgttccaccaggcccacgtcgcgggggagaccgtggcccggcccctcttcctggagttccccaaggactctagcacctggactgtggaccaccagctcctgtggggggaggccctgctcatcaccccagtgctccaggccgggaaggccgaagtgactggctacttccccttgggcacatggtacgacctgcagacggtgccagtagaggcccttggcagcctcccacccccacctgcagctccccgtgagccagccatccacagcgaggggcagtgggtgacgctgccggcccccctggacaccatcaacgtccacctccgggctgggtacatcatccccctgcagggccctggcctcacaaccacagagtcccgccagcagcccatggccctggctgtggccctgaccaagggtggggaggcccgaggggagctgttctgggacgatggagagagcctggaagtgctggagcgaggggcctacacacaggtcatcttcctggccaggaataacacgatcgtgaatgagctggtacgtgtgaccagtgagggagctggcctgcagctgcagaaggtgactgtcctgggcgtggccacggcgccccagcaggtcctctccaacggtgtccctgtctccaacttcacctacagccccgacaccaaggtcctggacatctgtgtctcgctgttgatgggagagcagtttctcgtcagctggtgttag

SEQ ID NO: 124 - DNA, 2859 bp, Artificial Sequence; identical to SEQ ID NO: 5
  Codon optimized CO1-GAA

SEQ ID NO: 125 - DNA, 2859 bp, Artificial Sequence; identical to SEQ ID NO: 7
  Codon optimized CO2-GAA

SEQ ID NO: 126 - DNA, 2859 bp, Artificial Sequence
  Codon optimized CO3-GAA
atgggggtgagacaccccccctgcagccacagactgctggctgtgtgtgccctggtgagcctggccacagctgccctgctgggccacatcctgctgcatgacttcctactagtgcccagagagctgagtggcagcagccctgtgctggaggagacccaccctgcccaccagcagggggccagcagacctggccccagagatgcccaggcccaccctggcagacccagagctgtgcccacccagtgtgatgtgccccccaacagcagatttgactgtgcccctgacaaggccatcacccaggagcagtgtgaggccagaggctgctgctacatccctgccaagcagggcctgcagggggcccagatgggccagccctggtgcttcttcccccccagctaccccagctacaagctggagaacctgagcagcagtgagatgggctacacagccaccctgaccagaaccacccccaccttcttccccaaggacatcctgaccctgagactggatgtgatgatggagacagagaacagactgcacttcaccatcaaggaccctgccaacagaagatatgaggtgcccctggagaccccccatgtgcacagcagagcccccagccccctgtacagtgtggagttcagtgaggagccctttggggtgattgtgagaagacagctggatggcagagtgctgctgaacaccacagtggcccccctgttctttgctgaccagttcctgcagctgagcaccagcctgcccagccagtacatcacaggcctggctgagcacctgagccccctgatgctgagcaccagctggaccagaatcaccctgtggaacagagacctggcccccacccctggggccaacctgtatggcagccaccccttctacctggccctggaggatgggggcagtgcccatggggtgttcctgctgaacagcaatgccatggatgtggtgctgcagcccagccctgccctgagctggagaagcacagggggcatcctggatgtgtacatcttcctgggccctgagcccaagagtgtggtgcagcagtacctggatgtggtgggctaccccttcatgcccccctactggggcctgggcttccacctgtgcagatggggctacagcagcacagccatcaccagacaggtggtggagaacatgaccagagcccacttccccctggatgtgcagtggaatgacctggactacatggacagcagaagagacttcaccttcaacaaggatggcttcagagacttccctgccatggtgcaggagctgcaccaggggggcagaagatacatgatgattgtggaccctgccatcagcagcagtggccctgctggcagctacagaccctatgatgagggcctgagaagaggggtgttcatcaccaatgagacaggccagcccctgattggcaaggtgtggcctggcagcacagccttccctgacttcaccaaccccacagccctggcctggtgggaggacatggtggctgagttccatgaccaggtgccctttgatggcatgtggattgacatgaatgagcccagcaacttcatcagaggcagtgaggatggctgccccaacaatgagctggagaaccccccctatgtgcctggggtggtggggggcaccctgcaggctgccaccatctgtgccagcagccaccagttcctgagcacccactacaacctgcacaacctgtatggcctgacagaggccattgccagccacagagccctggtgaaggccagaggcaccagaccctttgtgatcagcagaagcacctttgctggccatggcagatatgctggccactggacaggggatgtgtggagcagctgggagcagctggccagcagtgtgcctgagatcctgcagttcaacctgctgggggtgcccctggtgggggctgatgtgtgtggcttcctgggcaacaccagtgaggagctgtgtgtgagatggacccagctgggggccttctaccccttcatgagaaaccacaacagcctgctgagcctgccccaggagccctacagcttcagtgagcctgcccagcaggccatgagaaaggccctgaccctgagatatgccctgctgccccacctgtacaccctgttccaccaggcccatgtggctggggagacagtggccagacccctgttcctggagttccccaaggacagcagcacctggacagtggaccaccagctgctgtggggggaggccctgctgatcacccctgtgctgcaggctggcaaggctgaggtgacaggctacttccccctgggcacctggtatgacctgcagacagtgcctgtggaggccctgggcagcctgccccccccccctgctgcccccagagagcctgccatccacagtgagggccagtgggtgaccctgcctgcccccctggacaccatcaatgtgcacctgagagctggctacatcatccccctgcagggccctggcctgaccaccacagagagcagacagcagcccatggccctggctgtggccctgaccaaggggggggaggccagaggggagctgttctgggatgatggggagagcctggaggtgctggagagaggggcctacacccaggtgatcttcctggccagaaacaacaccattgtgaatgagctggtgagagtgaccagtgagggggctggcctgcagctgcagaaggtgacagtgctgggggtggccacagccccccagcaggtgctgagcaatggggtgcctgtgagcaacttcacctacagccctgacaccaaggtgctggacatctgtgtgagcctgctgatgggggagcagttcctggtgagctggtgctga

SEQ ID NO: 127 - DNA, 1290 bp, Homo sapiens; identical to SEQ ID NO: 9
  misc_feature (1)..(1290): Alpha-Galactosidase A (GLA)

SEQ ID NO: 128 - DNA, 1290 bp, Artificial Sequence; identical to SEQ ID NO: 10
  Codon optimized CO1-GLA

SEQ ID NO: 129 - DNA, 1377 bp, Artificial Sequence
  Codon optimized + GET, CO1-GLA-GET
atgcagctgagaaatcctgaactgcacctgggctgtgccctggctctgagatttctggctctggtgtcctgggacattcctggcgctagagccctggataatggcctggccagaacacctacaatgggctggctgcactgggagagattcatgtgcaacctggactgccaagaggaacccgacagctgcatcagcgagaagctgttcatggaaatggccgagctgatggtgtccgaaggctggaaggatgccggctacgagtacctgtgcatcgacgattgctggatggcccctcagagagattctgagggcagactgcaggccgatcctcagagatttcctcacggaatccggcagctggccaactacgtgcactctaagggactgaagctgggcatctacgccgacgtgggcaacaagacatgtgccggctttccaggcagcttcggctactacgatatcgacgcccagacctttgccgattggggcgtcgacctgctgaagttcgatggctgctactgcgacagcctggaaaacctggccgacggctacaaacacatgtctctggccctgaaccggaccggcagatctatcgtgtactcttgcgagtggcccctgtacatgtggcccttccagaagcctaactacaccgagatcagacagtactgcaaccactggcggaacttcgccgacatcgatgacagctggaagtccatcaagagcatcctggactggaccagcttcaatcaagagcggatcgtggatgtggctggcccaggcggatggaacgatcctgatatgctggtcatcggcaacttcggcctgagctggaatcagcaagtgacccagatggccctgtgggccattatggccgctcctctgttcatgagcaacgacctgagacacatcagccctcaggccaaggctctgctgcaggataaggacgtgatcgccatcaaccaggatcctctgggcaagcagggctatcagctgagacagggcgacaatttcgaagtgtgggaaagacctctgagcggcctggcttgggccgtcgccatgatcaatagacaagagatcggcggaccccggtcctatacaattgccgtggcttctctcggaaaaggcgtggcctgcaatcctgcctgctttatcacacagctgctccccgtgaagagaaagctgggcttttacgagtggaccagcagactgagatcccacatcaaccccacaggcactgttctgctgcaactggaaaacacaatgcagatgagcctgaaggacctgctgcggagaagaagaaggcgcagacgcaagcgcaagaagaaaggcaaaggcctcggcaagaagcgggacccctgtctgagaaagtacaagtaa

SEQ ID NO: 130 - DNA, 1290 bp, Artificial Sequence
  Codon optimized CO2-GLA
atgcagctgagaaaccctgagctgcacctgggctgtgccctggccctgagattcctggccctggtgagctgggacatccctggggccagagccctggacaatgggctagccagaacccccaccatgggctggctgcactgggagagattcatgtgcaacctggactgccaggaggagcctgacagctgcatcagtgagaagctgttcatggagatggctgagctgatggtgagtgagggctggaaggatgctggctatgagtacctgtgcattgatgactgctggatggccccccagagagacagtgagggcagactgcaggctgacccccagagattcccccatggcatcagacagctggccaactatgtgcacagcaagggcctgaagctgggcatctatgctgatgtgggcaacaagacctgtgctggcttccctggcagctttggctactatgacattgatgcccagacctttgctgactggggggtggacctgctgaagtttgatggctgctactgtgacagcctggagaacctggctgatggctacaagcacatgagcctggccctgaacagaacaggcagaagcattgtgtacagctgtgagtggcccctgtacatgtggcccttccagaagcccaactacacagagatcagacagtactgcaaccactggagaaactttgctgacattgatgacagctggaagagcatcaagagcatcctggactggaccagcttcaaccaggagagaattgtggatgtggctggccctgggggctggaatgaccctgacatgctggtgattggcaactttggcctgagctggaaccagcaggtgacccagatggccctgtgggccatcatggctgcccccctgttcatgagcaatgacctgagacacatcagcccccaggccaaggccctgctgcaggacaaggatgtgattgccatcaaccaggaccccctgggcaagcagggctaccagctgagacagggggacaactttgaggtgtgggagagacccctgagtggcctggcctgggctgtggccatgatcaacagacaggagattgggggccccagaagctacaccattgctgtggccagcctgggcaagggggtggcctgcaaccctgcctgcttcatcacccagctgctgcctgtgaagagaaagctgggcttctatgagtggaccagcagactgagaagccacatcaaccccacaggcacagtgctgctgcagctggagaacaccatgcagatgagcctgaaggacctgctgtga

SEQ ID NO: 131 - DNA, 1290 bp, Artificial Sequence
  Codon optimized CO3-GLA
atgcagctgagaaaccctgagctgcacctgggctgtgccctggccctgagattcctggccctggtgagctgggacatccctggggccagagccctggacaatgggctagccagaacccccaccatgggctggctgcactgggagagattcatgtgcaacctggactgccaggaggagcctgacagctgcatcagtgagaagctgttcatggagatggctgagctgatggtgagtgagggctggaaggatgctggctatgagtacctgtgcattgatgactgctggatggccccccagagagacagtgagggcagactgcaggctgacccccagagattcccccatggcatcagacagctggccaactatgtgcacagcaagggcctgaagctgggcatctatgctgatgtgggcaacaagacctgtgctggcttccctggcagctttggctactatgacattgatgcccagacctttgctgactggggggtggacctgctgaagtttgatggctgctactgtgacagcctggagaacctggctgatggctacaagcacatgagcctggccctgaacagaacaggcagaagcattgtgtacagctgtgagtggcccctgtacatgtggcccttccagaagcccaactacacagagatcagacagtactgcaaccactggagaaactttgctgacattgatgacagctggaagagcatcaagagcatcctggactggaccagcttcaaccaggagagaattgtggatgtggctggccctgggggctggaatgaccctgacatgctggtgattggcaactttggcctgagctggaaccagcaggtgacccagatggccctgtgggccatcatggctgcccccctgttcatgagcaatgacctgagacacatcagcccccaggccaaggccctgctgcaggacaaggatgtgattgccatcaaccaggaccccctgggcaagcagggctaccagctgagacagggggacaactttgaggtgtgggagagacccctgagtggcctggcctgggctgtggccatgatcaacagacaggagattgggggccccagaagctacaccattgctgtggcttccctgggtaaaggagtggcctgtaatcctgcctgcttcatcacacagctcctccctgtgaaaaggaagctagggttctatgaatggacttcaaggttaagaagtcacataaatcccacaggcactgttttgcttcagctagaaaatacaatgcagatgtcattaaaagacttactttaa

SEQ ID NO: 132 - DNA, 4287 bp, Artificial Sequence; identical to SEQ ID NO: 4
  Codon optimized, Cystic Fibrosis Transmembrane Regulator deltaR (CFTRdeltaR) contains R domain deletion

SEQ ID NO: 133 - DNA, 4443 bp, Artificial Sequence; identical to SEQ ID NO: 93
  Codon optimized, full length Cystic Fibrosis Transmembrane Regulator (CFTR)

SEQ ID NO: 134 - protein, 502 aa, Homo sapiens
  MISC_FEATURE (1)..(502): Sulfoglucosamine sulfohydrolase (SGSH)
MSCPVPACCALLLVLGLCRARPRNALLLLADDGGFESGAYNNSAIATPHLDALARRSLLFRNAFTSVSSCSPSRASLLTGLPQHQNGMYGLHQDVHHFNSFDKVRSLPLLLSQAGVRTGIIGKKHVGPETVYPFDFAYTEENGSVLQVGRNITRIKLLVRKFLQTQDDQPFFLYVAFHDPHRCGHSQPQYGTFCEKFGNGESGMGRIPDWTPQAYDPLDVLVPYFVPNTPAARADLAAQYTTVGRMDQGVGLVLQELRDAGVLNDTLVIFTSDNGIPFPSGRTNLYWPGTAEPLLVSSPEHPKRWGQVSEAYVSLLDLTPTILDWFSIPYPSYAIFGSKTIHLTGRSLLPALEAEPLWATVFGSQSHHEVTMSYPMRSVQHRHFRLVHNLNFKMPFPIDQDFYVSPTFQDLLNRTTAGQPTGWYKDLRHYYYRARWELYDRSRDPHETQNLATDPRFAQLLEMLRDQLAKWQWETHDPWVCAPDGVLEEKLSPQCQPLHNEL

SEQ ID NO: 135 - protein, 531 aa, Artificial Sequence
  Codon optimized + GET CO1-SGSH-GET
MSCPVPACCALLLVLGLCRARPRNALLLLADDGGFESGAYNNSAIATPHLDALARRSLLFRNAFTSVSSCSPSRASLLTGLPQHQNGMYGLHQDVHHFNSFDKVRSLPLLLSQAGVRTGIIGKKHVGPETVYPFDFAYTEENGSVLQVGRNITRIKLLVRKFLQTQDDQPFFLYVAFHDPHRCGHSQPQYGTFCEKFGNGESGMGRIPDWTPQAYDPLDVLVPYFVPNTPAARADLAAQYTTVGRMDQGVGLVLQELRDAGVLNDTLVIFTSDNGIPFPSGRTNLYWPGTAEPLLVSSPEHPKRWGQVSEAYVSLLDLTPTILDWFSIPYPSYAIFGSKTIHLTGRSLLPALEAEPLWATVFGSQSHHEVTMSYPMRSVQHRHFRLVHNLNFKMPFPIDQDFYVSPTFQDLLNRTTAGQPTGWYKDLRHYYYRARWELYDRSRDPHETQNLATDPRFAQLLEMLRDQLAKWQWETHDPWVCAPDGVLEEKLSPQCQPLHNELRRRRRRRRKRKKKGKGLGKKRDPCLRKYK

SEQ ID NO: 136 - protein, 306 aa, Artificial Sequence
  Codon optimized Ceroid Lipofuscinosis, Neuronal, 1 (CLN1)
MASPGCLWLLAVALLPWTCASRALQHLDPPAPLPLVIWHGMGDSCCNPLSMGAIKKMVEKKIPGIYVLSLEIGKTLMEDVENSFFLNVNSQVTTVCQALAKDPKLQQGYNAMGFSQGGQFLRAVAQRCPSPPMINLISVGGQHQGVFGLPRCPGESSHICDFIRKTLNAGAYSKVVQERLVQAEYWHDPIKEDVYRNHSIFLADINQERGINESYKKNLMALKKFVMVKFLNDSIVDPVDSEWFGFYRSGQAKETIPLQETSLYTQDRLGLKEMDNAGQLVFLATEGDHLQLSEEWFYAHIIPFLG

SEQ ID NO: 137 - protein, 294 aa, Homo sapiens
  MISC_FEATURE (1)..(294): Survival Motor Neuron 1 (SMN1)
MAMSSGGSGGGVPEQEDSVLFRRGTGQSDDSDIWDDTALIKAYDKAVASFKHALKNGDICETSGKPKTTPKRKPAKKNKSQKKNTAASLQQWKVGDKCSAIWSEDGCIYPATIASIDFKRETCVVVYTGYGNREEQNLSDLLSPICEVANNIEQNAQENENESQVSTDESENSRSPGNKSDNIKPKSAPWNSFLPPPPPMPGPRLGPGKPGLKFNGPPPPPPPPPPHLLSCWLPPFPSGPPIIPPPPPICPDSLDDADALGSMLISWYMSGYHTGYYMGFRQNQKEGRCSHSLN

SEQ ID NO: 138 - protein, 515 aa, Homo sapiens
  MISC_FEATURE (1)..(515): Tissue Non-specific Alkaline Phosphatase (TNALP)
MISPFLVLAIGTCLTNSLVPEKEKDPKYWRDQAQETLKYALELQKLNTNVAKNVIMFLGDGMGVSTVTAARILKGQLHHNPGEETRLEMDKFPFVALSKTYNTNAQVPDSAGTATAYLCGVKANEGTVGVSAATERSRCNTTQGNEVTSILRWAKDAGKSVGIVTTTRVNHATPSAAYAHSADRDWYSDNEMPPEALSQGCKDIAYQLMHNIRDIDVIMGGGRKYMYPKNKTDVEYESDEKARGTRLDGLDLVDTWKSFKPRYKHSHFIWNRTELLTLDPHNVDYLLGLFEPGDMQYELNRNNVTDPSLSEMVVVAIQILRKNPKGFFLLVEGGRIDHGHHEGKAKQALHEAVEMDRAIGQAGSLTSSEDTLTVVTADHSHVFTFGGYTPRGNSIFGLAPMLSDTDKKPFTAILYGNGPGYKVVGGERENVSMVDYAHNNYQAQSAVPLRHETHGGEDVAVFSKGPMAHLLHGVHEQNYVPHVMAYAACIGANLGHCAPASSAGSDDDDDDDDDD

SEQ ID NO: 139 - protein, 211 aa, Homo sapiens
  MISC_FEATURE (1)..(211): Glial Cell Derived Neurotrophic Factor (GDNF)
MKLWDVVAVCLVLLHTASAFPLPAGKRPPEAPAEDRSLGRRRAPFALSSDSNMPEDYPDQFDDVMDFIQATIKRLKRSPDKQMAVLPRRERNRQAAAANPENSRGKGRRGQRGKNRGCVLTAIHLNVTDLGLGYETKEELIFRYCSGSCDAAETTYDKILKNLSRNRRLVSDKVGQACCRPIAFDDDLSFLDDNLVYHILRKHSAKRCGCI

SEQ ID NO: 140 - protein, 536 aa, Homo sapiens
  MISC_FEATURE (1)..(536): Tissue Glucosyl Ceramidase beta (GBA1)
MEFSSPSREECPKPLSRVSIMAGSLTGLLLLQAVSWASGARPCIPKSFGYSSVVCVCNATYCDSFDPPTFPALGTFSRYESTRSGRRMELSMGPIQANHTGTGLLLTLQPEQKFQKVKGFGGAMTDAAALNILALSPPAQNLLLKSYFSEEGIGYNIIRVPMASCDFSIRTYTYADTPDDFQLHNFSLPEEDTKLKIPLIHRALQLAQRPVSLLASPWTSPTWLKTNGAVNGKGSLKGQPGDIYHQTWARYFVKFLDAYAEHKLQFWAVTAENEPSAGLLSGYPFQCLGFTPEHQRDFIARDLGPTLANSTHHNVRLLMLDDQRLLLPHWAKVVLTDPEAAKYVHGIAVHWYLDFLAPAKATLGETHRLFPNTMLFASEACVGSKFWEQSVRLGSWDRGMQYSHSIITNLLYHVVGWTDWNLALNPEGGPNWVRNFVDSPIIVDITKDTFYKQPMFYHLGHFSKFIPEGSQRVGLVASQKNDLDAVALMHPDGSAVVVVLNRSSKDVPLTIKDPAVGFLETISPGYSIHTYLWRRQ

SEQ ID NO: 141 - protein, 653 aa, Homo sapiens
  MISC_FEATURE (1)..(653): Iduronidase alpha-L- (IDUA)
MRPLRPRAALLALLASLLAAPPVAPAEAPHLVHVDAARALWPLRRFWRSTGFCPPLPHSQADQYVLSWDQQLNLAYVGAVPHRGIKQVRTHWLLELVTTRGSTGRGLSYNFTHLDGYLDLLRENQLLPGFELMGSASGHFTDFEDKQQVFEWKDLVSSLARRYIGRYGLAHVSKWNFETWNEPDHHDFDNVSMTMQGFLNYYDACSEGLRAASPALRLGGPGDSFHTPPRSPLSWGLLRHCHDGTNFFTGEAGVRLDYISLHRKGARSSISILEQEKVVAQQIRQLFPKFADTPIYNDEADPLVGWSLPQPWRADVTYAAMVVKVIAQHQNLLLANTTSAFPYALLSNDNAFLSYHPHPFAQRTLTARFQVNNTRPPHVQLLRKPVLTAMGLLALLDEEQLWAEVSQAGTVLDSNHTVGVLASAHRPQGPADAWRAAVLIYASDDTRAHPNRSVAVTLRLRGVPPGPGLVYVTRYLDNGLCSPDGEWRRLGRPVFPTAEQFRRMRAAEDPVAAAPRPLPAGGRLTLRPALRLPSLLLVHVCARPEKPPGQVTRLRALPLTQGQLVLVWSDEHVGSKCLWTYEIQFSQDGKAYTPVSRKPSTFNLFVFSPDTGAVSGSYRVRALDYWARPGPFSDPVPYLEVPVPRGPPSPGNP

SEQ ID NO: 142 - protein, 525 aa, Homo sapiens
  MISC_FEATURE (1)..(525): Cytochrome P450 family 4 subfamily V member 2 (CYP4V2)
MAGLWLGLVWQKLLLWGAASALSLAGASLVLSLLQRVASYARKWQQMRPIPTVARAYPLVGHALLMKPDGREFFQQIIEYTEEYRHMPLLKLWVGPVPMVALYNAENVEVILTSSKQIDKSSMYKFLEPWLGLGLLTSTGNKWRSRRKMLTPTFHFTILEDFLDIMNEQANILVKKLEKHINQEAFNCFFYITLCALDIICETAMGKNIGAQSNDDSEYVRAVYRMSEMIFRRIKMPWLWLDLWYLMFKEGWEHKKSLQILHTFTNSVIAERANEMNANEDCRGDGRGSAPSKNKRRAFLDLLLSVTDDEGNRLSHEDIREEVDTFMFEGHDTTAAAINWSLYLLGSNPEVQKKVDHELDDVFGKSDRPATVEDLKKLRYLECVIKETLRLFPSVPLFARSVSEDCEVAGYRVLKGTEAVIIPYALHRDPRYFPNPEEFQPERFFPENAQGRHPYAYVPFSAGPRNCIGQKFAVMEEKTILSCILRHFWIESNQKREELGLEGQLILRPSNGIWIKLKRRNADER

SEQ ID NO: 143 - protein, 236 aa, Homo sapiens
  MISC_FEATURE (1)..(236): Retinoschisin 1 (RS1)
MSRKIEGFLLLLLFGYEATLGLSSTEDEGEDPWYQKACDEGEDPWYQKACKCDCQGGPNALWSAGATSLDCIPECPYHKPLGFESGEVTPDQITCSNPEQYVGWYSSWTANKARLNSQGFGCAWLSKFQDSSQWLQIDLKEIKVISGILTQGRCDIDEWMTKYSVQYRTDERLNWIYYKDQTGNNRVFYGNSDRTSTVQNLLRPPIISRFIRLIPLGWHVRIAIRMELLECVSKCA

SEQ ID NO: 144 - protein, 854 aa, Homo sapiens
  MISC_FEATURE (1)..(854): Phosphodiesterase 6B (PDE6B)
MSLSEEQARSFLDQNPDFARQYFGKKLSPENVAAACEDGCPPDCDSLRDLCQVEESTALLELVQDMQESINMERVVFKVLRRLCTLLQADRCSLFMYRQRNGVAELATRLFSVQPDSVLEDCLVPPDSEIVFPLDIGVVGHVAQTKKMVNVEDVAECPHFSSFADELTDYKTKNMLATPIMNGKDVVAVIMAVNKLNGPFFTSEDEDVFLKYLNFATLYLKIYHLSYLHNCETRRGQVLLWSANKVFEELTDIERQFHKAFYTVRAYLNCERYSVGLLDMTKEKEFFDVWSVLMGESQPYSGPRTPDGREIVFYKVIDYILHGKEEIKVIPTPSADHWALASGLPSYVAESGFICNIMNASADEMFKFQEGALDDSGWLIKNVLSMPIVNKKEEIVGVATFYNRKDGKPFDEQDEVLMESLTQFLGWSVMNTDTYDKMNKLENRKDIAQDMVLYHVKCDRDEIQLILPTRARLGKEPADCDEDELGEILKEELPGPTTFDIYEFHFSDLECTELDLVKCGIQMYYELGVVRKFQIPQEVLVRFLFSISKGYRRITYHNWRHGFNVAQTMFTLLMTGKLKSYYTDLEAFAMVTAGLCHDIDHRGTNNLYQMKSQNPLAKLHGSSILERHHLEFGKFLLSEETLNIYQNLNRRQHEHVIHLMDIAIIATDLALYFKKRAMFQKIVDESKNYQDKKSWVEYLSLETTRKEIVMAMMMTACDLSAITKPWEVQSKVALLVAAEFWEQGDLERTVLDQQPIPMMDRNKAAELPKLQVGFIDFVCTFVYKEFSRFHEEILPMFDRLQNNRKEWKALADEYEAKVKALEEKEEEERVAAKKVGTEICNGGPAPKSSTCCIL

SEQ ID NO: 145 - protein, 498 aa, Homo sapiens [sequence omitted]

SEQ ID NO: 146 - protein, 743 aa, Homo sapiens
  MISC_FEATURE (1)..(743): N-acetyl-alpha-glucosaminidase (NAGLU)
MEAVAVAAAVGVLLLAGAGGAAGDEAREAAAVRALVARLLGPGPAADFSVSVERALAAKPGLDTYSLGGGGAARVRVRGSTGVAAAAGLHRYLRDFCGCHVAWSGSQLRLPRPLPAVPGELTEATPNRYRYYQNVCTQSYSFVWWDWARWEREIDWMALNGINLALAWSGQEAIWQRVYLALGLTQAEINEFFTGPAFLAWGRMGNLHTWDGPLPPSWHIKQLYLQHRVLDQMRSFGMTPVLPAFAGHVPEAVTRVFPQVNVTKMGSWGHFNCSYSCSFLLAPEDPIFPIIGSLFLRELIKEFGTDHIYGADTFNEMQPPSSEPSYLAAATTAVYEAMTAVDTEAVWLLQGWLFQHQPQFWGPAQIRAVLGAVPRGRLLVLDLFAESQPVYTRTASFQGQPFIWCMLHNFGGNHGLFGALEAVNGGPEAARLFPNSTMVGTGMAPEGISQNEVVYSLMAELGWRKDPVPDLAAWVTSFAARRYGVSHPDAGAAWRLLLRSVYNCSGEACRGHNRSPLVRRPSLQMNTSIWYNRSDVFEAWRLLLTSAPSLATSPAFRYDLLDLTRQAVQELVSLYYEEARSAYLSKELASLLRAGGVLAYELLPALDEVLASDSRFLLGSWLEQARAAAVSEAEADFYEQNSRYQLTLWGPEGNILDYANKQLAGLVANYYTPRWRLFLEALVDSVAQGIPFQQHQFDKNVFQLEQAFVLSKQRYPSQPRGDTVDLAKKIFLKYYPGWVAGSW

SEQ ID NO: 147 - skipped

SEQ ID NO: 148 - protein, 429 aa, Homo sapiens; identical to SEQ ID NO: 11
  MISC_FEATURE (1)..(429): Alpha-Galactosidase A (GLA)

SEQ ID NO: 149 - protein, 458 aa, Artificial Sequence
  Codon optimized + GET, CO1-GLA-GET
MQLRNPELHLGCALALRFLALVSWDIPGARALDNGLARTPTMGWLHWERFMCNLDCQEEPDSCISEKLFMEMAELMVSEGWKDAGYEYLCIDDCWMAPQRDSEGRLQADPQRFPHGIRQLANYVHSKGLKLGIYADVGNKTCAGFPGSFGYYDIDAQTFADWGVDLLKFDGCYCDSLENLADGYKHMSLALNRTGRSIVYSCEWPLYMWPFQKPNYTEIRQYCNHWRNFADIDDSWKSIKSILDWTSFNQERIVDVAGPGGWNDPDMLVIGNFGLSWNQQVTQMALWAIMAAPLFMSNDLRHISPQAKALLQDKDVIAINQDPLGKQGYQLRQGDNFEVWERPLSGLAWAVAMINRQEIGGPRSYTIAVASLGKGVACNPACFITQLLPVKRKLGFYEWTSRLRSHINPTGTVLLQLENTMQMSLKDLLRRRRRRRRKRKKKGKGLGKKRDPCLRKYK

SEQ ID NO: 150 - protein, 1428 aa, Artificial Sequence; identical to SEQ ID NO: 95
  Codon optimized, Cystic Fibrosis Transmembrane Regulator deltaR (CFTRdeltaR) contains R domain deletion

SEQ ID NO: 151 - protein, 1480 aa, Artificial Sequence; identical to SEQ ID NO: 94
  Codon optimized, full length Cystic Fibrosis Transmembrane Regulator (CFTR)

SEQ ID NO: 152 - DNA, 250 bp, Artificial Sequence; identical to SEQ ID NO: 96
  Mouse U1a promoter

SEQ ID NO: 153 - DNA, 101 bp, Artificial Sequence; identical to SEQ ID NO: 97
  Polymerase III H1 mutant promoter

SEQ ID NO: 154 - DNA, 701 bp, Artificial Sequence
  Chicken beta-actin hybrid promoter CBh (CBh promoter consists of CMV enhancer, CBA promoter, first CBA exon and partial intron)
cgttacataacttacggtaaatggcccgcctggctgaccgcccaacgacccccgcccattgacgtcaatagtaacgccaatagggactttccattgacgtcaatgggtggagtatttacggtaaactgcccacttggcagtacatcaagtgtatcatatgccaagtacgccccctattgacgtcaatgacggtaaatggcccgcctggcattgtgcccagtacatgaccttatgggactttcctacttggcagtacatctacgtattagtcatcgctattaccatggtcgaggtgagccccacgttctgcttcactctccccatctcccccccctccccacccccaattttgtatttatttattttttaattattttgtgcagcgatgggggcggggggggggggggggcgcgcgccaggcggggcggggcggggcgaggggcggggcggggcgaggcggagaggtgcggcggcagccaatcagagcggcgcgctccgaaagtttccttttatggcgaggcggcggcggcggcggccctataaaaagcgaagcgcgcggcgggcgggagtcgctgcgcgctgccttcgccccgtgccccgctccgccgccgcctcgcgccgcccgccccggctctgactgaccgcgttactcccacaggtgagcgggcgggacggcccttctcctccgggctgtaattagc

SEQ ID NO: 155 - DNA, 229 bp, Artificial Sequence
  MeCP2 min promoter sequence
agctgaatggggtccgcctcttttccctgcctaaacagacaggaactcctgccaattgagggcgtcaccgctaaggctccgccccagcctgggctccacaaccaatgaagggtaatctcgacaaagagcaaggggtggggcgcgggcgcgcaggtgcagcagcacacaggctggtcgggagggcggggcgcgacgtctgccgtgcggggtcccggcatcggttgcgcgc

SEQ ID NO: 156 - DNA, 737 bp, Artificial Sequence
  MeCP2 promoter sequence
tcaaaccatctgattcaacaatgcacgaccgatctcttatgggcttggcacacaccatctgcccattataaacgtctgcaaagaccaaggtttgatatgttgattttactgtcagccttaagagtgcgacatctgctaatttagtgtaataatacaatcagtagaccctttaaaacaagtcccttggcttggaacaacgccaggctcctcaacaggcaactttgctacttctacagaaaatgataataaagaaatgctggtgaagtcaaatgcttatcacaatggtgaactactcagcagggaggctctaataggcgccaagagcctagacttccttaagcgccagagtccacaagggcccagttaatcctcaacattcaaatgctgcccacaaaaccagcccctctgtgccctagccgcctcttttttccaagtgacagtagaactccaccaatccgcagctgaatggggtccgcctcttttccctgcctaaacagacaggaactcctgccaattgagggcgtcaccgctaaggctccgccccagcctgggctccacaaccaatgaagggtaatctcgacaaagagcaaggggtggggcgcgggcgcgcaggtgcagcagcacacaggctggtcgggagggcggggcgcgacgtctgccgtgcggggtcccggcatcggttgcgcgcgcgctccctcctctcggagagagggctgtggtaaaacccgtccggaaaa

SEQ ID NO: 157 - DNA, 418 bp, Artificial Sequence
  MeCP418 promoter sequence
ataggcgccaagagcctagacttccttaagcgccagagtccacaagggcccagttaatcctcaacattcaaatgctgcccacaaaaccagcccctctgtgccctagccgcctcttttttccaagtgacagtagaactccaccaatccgcagctgaatggggtccgcctcttttccctgcctaaacagacaggaactcctgccaattgagggcgtcaccgctaaggctccgccccagcctgggctccacaaccaatgaagggtaatctcgacaaagagcaaggggtggggcgcgggcgcgcaggtgcagcagcacacaggctggtcgggagggcggggcgcgacgtctgccgtgcggggtcccggcatcggttgcgcgcgcgctccctcctctcggagagagggctgtggtaaaacccg

SEQ ID NO: 158 - DNA, 426 bp, Artificial Sequence
  MeCP426 promoter sequence
ataggcgccaagagcctagacttccttaagcgccagagtccacaagggcccagttaatcctcaacattcaaatgctgcccacaaaaccagcccctctgtgccctagccgcctcttttttccaagtgacagtagaactccaccaatccgcagctgaatggggtccgcctcttttccctgcctaaacagacaggaactcctgccaattgagggcgtcaccgctaaggctccgccccagcctgggctccacaaccaatgaagggtaatctcgacaaagagcaaggggtggggcgcgggcgcgcaggtgcagcagcacacaggctggtcgggagggcggggcgcgacgtctgccgtgcggggtcccggcatcggttgcgcgcgcgctccctcctctcggagagagggctgtggtaaaacccgtccggaaa

SEQ ID NO: 159 - DNA, 400 bp, Artificial Sequence
  VMD2 promoter
aattctgtcattttactagggtgatgaaattcccaagcaacaccatccttttcagataagggcactgaggctgagagaggagctgaaacctacccggggtcaccacacacaggtggcaaggctgggaccagaaaccaggactgttgactctggattttagggccatggtagagggggtgttgccctaaattccagccctggtctcagcccaacaccctccaagaagaaattagaggggccatggccaggctgtgctagccgttgcttctgagcagattacaagaagggactaagacaaggactcctttgtggaggtcctggcttagggagtcaagtgacggcggctcagcactcacgtgggcagtgccagcctctaagagtgggcaggggcactggccac

SEQ ID NO: 160 - DNA, 136 bp, Artificial Sequence
  PDE6b promoter
cccatttgtaggagtgagtcagctgacccgcccccggggttcctaatctcactaagaaagactttgctgatgacagggtttcctgggagtccatgcgtgcctggagcagcagcgtctccagggacaggcagccacc

SEQ ID NO: 161 - DNA, 2035 bp, Artificial Sequence
  mRho promoter
gcgccaatcagccgatgacttctaacaatactcttaactcacacagagcttgtctcactgagccaacaccctgtaccctcagctcagtgacggctttcaacctgtggggctgcctctgttacccaagtgagagagggccagtgctcccagaggtgaccttgtttgcccattctctccctgggtcagccagtgtttatctgttgtatacccagtccaccctgcaggctcacatcagagcctaggagatggctagtgtccccgcggagaccacgatgaagcttcccagctgtctcaagcacaagctggctgcagaggctgctgaggcactgctagctggggatgggggcagggtagatctggggctgaccaccagggtcagaatcagaacctccaccttgacctcattaacgctggtcttaatcaccaagccaagctccttaaactgctagtggccaactcccaggccctgacacacatacctgccctgtgttcccaaacaagacacctgcatggaaggaagggggttgcttttctaagcaaacatctaggaatcccgggtgcagtgtgaggagactaggcgagggagtactttaagggcctcaaggctcagagaggaatacttcttccctggttagcctcgtgcctaggctccagggtctttgtcctgcctggatacctatgtggcaaggggcatagcatttcccccaccatcagctcttagctcaaccttatcttctcggaaagactgcgcagtgtaacaacacagcagagacttttcttttgtcccctgtctacccctgtaactgctactcagaagcatctttctcacagggtactggcttcttgcatccagagttttttgtctccctcgggcccccagaatcaaattcttcctctgggactcagtggatgtttcacacacgtatcggcctgacagtcatcctggagcatcctacacaggggccatcacagctgcatgtcagaaatgctggcctcacatcctcagacaccaggcctagtgctggtcttcctcagactggcgtccccagcaggccagtaggatcatcttttagcctacagagttctgaagcctcagagccccaggtccctggtcatcttctctgcccctgagatttttccaagttgtatgccttctaggtaaggcaaaacttcttacgcccctcctcgtggcctccaggccccacatgctcacctgaataacctggcagcctgctccctcatgcagggaccacgtcctgctgcacccagcaggccatcccgtctccatagcccatggtcatccctccctggacaggaatgtgtctcctccccgggctgagtcttgctcaagctagaagcactccgaacagggttatgggcgcctcctccatctcccaagtggctggcttatgaatgtttaatgtacatgtgagtgaacaaattccaattgaacgcaacaaatagttatcgagccgctgagccggggggcggggggtgtgagactggaggcgatggacggagctgacggcacacacagctcagatctgtcaagtgagccattgtcagggcttggggactggataagtcagggggtctcctgggaagagatgggataggtgagttcaggaggagacattgtcaactggagccatgtggagaagtgaatttagggcccaaaggttccagtcgcagcctgaggccaccagactgacatggggaggaattcccagaggactctggggcagacaagatgagacaccctttcctttctttacctaagggcctccacccgatgtcaccttggcccctctgcaagccaattaggccccggtggcagcagtgggattagcgttagtatgatatctcgcggatgctgaatcagcctctggcttagggagagaaggtcactttataagggtctggggggggtcagtgcctggagttgcgctgtgggagccgtcagtggctgagctcgccaagcagccttggtctctgtctacgaagagcccgtggggcagcctcgagagccgcagcc

SEQ ID NO: 162 - DNA, 511 bp, Artificial Sequence
  CMV promoter
ccgttacataacttacggtaaatggcccgcctggctgaccgcccaacgacccccgcccattgacgtcaatagtaacgccaatagggactttccattgacgtcaatgggtggagtatttacggtaaactgcccacttggcagtacatcaagtgtatcatatgccaagtacgccccctattgacgtcaatgacggtaaatggcccgcctggcattgtgcccagtacatgaccttatgggactttcctacttggcagtacatctacgtattagtcatcgctattaccatggtgatgcggttttggcagtacatcaatgggcgtggatagcggtttgactcacggggatttccaagtctccaccccattgacgtcaatgggagtttgttttggcaccaaaatcaacgggactttccaaaatgtcgtaacaactccgccccattgacgcaaatgggcggtaggcgtgtacggtgggaggtctatataagcagagctcgtttagtgaaccgtcagat

SEQ ID NO: 163 - DNA, 334 bp, Artificial Sequence
  UbC promoter
ggcctccgcgccgggttttggcgcctcccgcgggcgcccccctcctcacggcgagcgctgccacgtcagacgaagggcgcagcgagcgtcctgatccttccgcccggacgctcaggacagcggcccgctgctcataagactcggccttagaaccccagtatcagcagaaggacattttaggacgggacttgggtgactctagggcactggttttctttccagagagcggaacaggcgaggaaaagtagtcccttctcggcgattctgcggagggatctccgtggggcggtgaacgccgatgattatataaggacgcgccgggtgtggcacagct

SEQ ID NO: 164 - protein, 737 aa, Artificial Sequence
  AAV 214-D5 VP1 capsid protein
MAADGYLPDWLEDNLSEGIREWWALKPGAPKPKANQQKQDDGRGLVLPGYKYLGPFNGLDKGEPVNAADAAALEHDKAYDQQLKAGDNPYLRYNHADAEFQERLQEDTSFGGNLGRAVFQAKKRVLEPFGLVEEGAKTAPGKKRPVEQSPQEPDSSSGIGKTGQQPAKKRLNFGQTGDSESVPDPQPLGEPPATPAAVGPTTMASGGGAPMADNNEGADGVGNASGNWHCDSTWLGDRVITTSTRTWALPTYNNHLYKQISNGTSGGSTNDNTYFGYSTPWGYFDFNRFHCHFSPRDWQRLINNNWGFRPKRLNFKLFNIQVKEVTDNNGVKTIANNLTSTVQVFTDSDYQLPYVLGSAHQGCLPPFPADVFMIPQYGYLTLNDGSQAVGRSSFYCLEYFPSQMLRTGNNFTFSYTFEDVPFHSSYAHSQSLDRLMNPLIDQYLYYLSKTQSTGGTAGTQQLLFSQAGPNTMANQAKNWLPGPCYRQQRVSTTTGQNNNSNFAWTAGTKYHLNGRNSLMNPGPAMASHKEGEDRFFPLSGSLIFGKQNAARDNADYSDVMLTSEEEIKTTNPVATEEYGIVADNLQQQNTAPQIGTVNSQGALPGMVWQNRDVYLQGPIWAKIPHTDGNFHPSPLMGGFGLKHPPPQILIKNTPVPADPPTTFNQSKLNSFITQYSTGQVSVEIEWELQKENSKRWNPEIQYTSNYYKSTSVDFAVNTEGVYSEPHPIGTRYLTRPL

SEQ ID NO: 165 - protein, 600 aa, Artificial Sequence
  AAV214-D5 VP2 capsid protein
MAPGKKRPVEQSPQEPDSSSGIGKTGQQPAKKRLNFGQTGDSESVPDPQPLGEPPATPAAVGPTTMASGGGAPMADNNEGADGVGNASGNWHCDSTWLGDRVITTSTRTWALPTYNNHLYKQISNGTSGGSTNDNTYFGYSTPWGYFDFNRFHCHFSPRDWQRLINNNWGFRPKRLNFKLFNIQVKEVTDNNGVKTIANNLTSTVQVFTDSDYQLPYVLGSAHQGCLPPFPADVFMIPQYGYLTLNDGSQAVGRSSFYCLEYFPSQMLRTGNNFTFSYTFEDVPFHSSYAHSQSLDRLMNPLIDQYLYYLSKTQSTGGTAGTQQLLFSQAGPNTMANQAKNWLPGPCYRQQRVSTTTGQNNNSNFAWTAGTKYHLNGRNSLMNPGPAMASHKEGEDRFFPLSGSLIFGKQNAARDNADYSDVMLTSEEEIKTTNPVATEEYGIVADNLQQQNTAPQIGTVNSQGALPGMVWQNRDVYLQGPIWAKIPHTDGNFHPSPLMGGFGLKHPPPQILIKNTPVPADPPTTFNQSKLNSFITQYSTGQVSVEIEWELQKENSKRWNPEIQYTSNYYKSTSVDFAVNTEGVYSEPHPIGTRYLTRPL

SEQ ID NO: 166 - protein, 535 aa, Artificial Sequence
  AAV214-D5 VP3 capsid protein
MASGGGAPMADNNEGADGVGNASGNWHCDSTWLGDRVITTSTRTWALPTYNNHLYKQISNGTSGGSTNDNTYFGYSTPWGYFDFNRFHCHFSPRDWQRLINNNWGFRPKRLNFKLFNIQVKEVTDNNGVKTIANNLTSTVQVFTDSDYQLPYVLGSAHQGCLPPFPADVFMIPQYGYLTLNDGSQAVGRSSFYCLEYFPSQMLRTGNNFTFSYTFEDVPFHSSYAHSQSLDRLMNPLIDQYLYYLSKTQSTGGTAGTQQLLFSQAGPNTMANQAKNWLPGPCYRQQRVSTTTGQNNNSNFAWTAGTKYHLNGRNSLMNPGPAMASHKEGEDRFFPLSGSLIFGKQNAARDNADYSDVMLTSEEEIKTTNPVATEEYGIVADNLQQQNTAPQIGTVNSQGALPGMVWQNRDVYLQGPIWAKIPHTDGNFHPSPLMGGFGLKHPPPQILIKNTPVPADPPTTFNQSKLNSFITQYSTGQVSVEIEWELQKENSKRWNPEIQYTSNYYKSTSVDFAVNTEGVYSEPHPIGTRYLTRPL

SEQ ID NO: 167 - DNA, 2214 bp, Artificial Sequence
  AAV214-D5 VP1 capsid protein coding sequence
atggctgccgatggttatcttccagattggctcgaggacaacctctctgagggcattcgcgagtggtgggcgctgaaacctggagccccgaagcccaaagccaaccagcaaaagcaggacgacggccggggtctggtgcttcctggctacaagtacctcggacccttcaacggactcgacaagggggagcccgtcaacgcggcggacgcagcggccctcgagcacgacaaggcctacgaccagcagctcaaagcgggtgacaatccgtacctgcggtataaccacgccgacgccgagtttcaggagcgtctgcaagaagatacgtcttttgggggcaacctcgggcgagcagtcttccaggccaagaagcgggttctcgaaccttttggtctggttgaggaaggtgctaagacggctcctggaaagaaacgtccggtagagcagtcgccacaagagccagactcctcctcgggcatcggcaagacaggccagcagcccgctaaaaagagactcaattttggtcagactggcgactcagagtcagtccccgacccacaacctctcggagaacctccagcaacccccgctgctgtgggacctactacaatggcttcaggcggtggcgcaccaatggcggacaataacgaaggcgccgacggagtgggtaatgcctcaggaaattggcattgcgattccacatggctgggcgacagagtcatcaccaccagcacccgcacctgggccttgcccacctacaataaccacctctacaagcaaatctccaacgggacttcgggaggaagcaccaacgacaacacctacttcggctacagcaccccctgggggtattttgacttcaacagattccactgccacttttcaccacgtgactggcaaagactcatcaacaacaactggggattccgacccaagagactcaacttcaagctctttaacattcaagtcaaagaggttacggacaacaatggagtcaagaccatcgccaataaccttaccagcacggtccaggtcttcacggactcagactatcagctcccgtacgtcctcggctctgcgcaccagggctgcctccctccgttcccggcggacgtgttcatgattccgcagtacggctacctaacgctcaacgacggcagccaggcagtgggacggtcatccttttactgcctggaatatttcccatcgcagatgctgagaacgggcaacaactttaccttcagctacacctttgaggacgttcctttccacagcagctacgctcacagccagagtctggaccgtctcatgaatcctctgattgaccagtacctgtactacttgtctaagactcagtccacgggaggtaccgcaggaactcagcagttgctattttctcaggccgggcctaatacaatggccaatcaggcaaagaactggctgccaggaccctgttaccgccaacaacgcgtctcaacgacaaccgggcaaaacaacaatagcaactttgcctggactgctgggaccaaataccatctgaatggaagaaattcattgatgaatcctggccccgctatggcatcccacaaagagggcgaggaccgtttttttcccctgtccgggtccctgatttttggcaaacaaaatgctgccagagacaatgcggattacagcgatgtcatgctcaccagcgaggaagaaatcaaaaccactaaccctgtggctacagaggaatacggtatcgtggcagataacttgcagcagcaaaacacggctcctcaaattggaactgtcaacagccagggggccttacccggtatggtctggcagaaccgggacgtgtacctgcagggtcccatctgggccaagattcctcacacggacggcaacttccacccgtctccgctgatgggcggctttggcctgaaacatcctccgcctcagatcctgatcaagaacacgcctgtacctgcggatcctccgaccaccttcaaccagtcaaagctgaactctttcatcacgcaatacagcaccggacaggtcagcgtggaaattgaatgggagctgcagaaggaaaacagcaagcgctggaaccccgagatccagtacacctccaactactacaaatctacaagtgtggactttgctgttaatacagaaggcgtgtactctgaaccccaccccattggcacccgttacctcacccgtcccctgtaa

SEQ ID NO: 168 - DNA, 1803 bp, Artificial Sequence
  AAV214-D5 VP2 capsid protein coding sequence
atggctcctggaaagaaacgtccggtagagcagtcgccacaagagccagactcctcctcgggcatcggcaagacaggccagcagcccgctaaaaagagactcaattttggtcagactggcgactcagagtcagtccccgacccacaacctctcggagaacctccagcaacccccgctgctgtgggacctactacaatggcttcaggcggtggcgcaccaatggcggacaataacgaaggcgccgacggagtgggtaatgcctcaggaaattggcattgcgattccacatggctgggcgacagagtcatcaccaccagcacccgcacctgggccttgcccacctacaataaccacctctacaagcaaatctccaacgggacttcgggaggaagcaccaacgacaacacctacttcggctacagcaccccctgggggtattttgacttcaacagattccactgccacttttcaccacgtgactggcaaagactcatcaacaacaactggggattccgacccaagagactcaacttcaagctctttaacattcaagtcaaagaggttacggacaacaatggagtcaagaccatcgccaataaccttaccagcacggtccaggtcttcacggactcagactatcagctcccgtacgtcctcggctctgcgcaccagggctgcctccctccgttcccggcggacgtgttcatgattccgcagtacggctacctaacgctcaacgacggcagccaggcagtgggacggtcatccttttactgcctggaatatttcccatcgcagatgctgagaacgggcaacaactttaccttcagctacacctttgaggacgttcctttccacagcagctacgctcacagccagagtctggaccgtctcatgaatcctctgattgaccagtacctgtactacttgtctaagactcagtccacgggaggtaccgcaggaactcagcagttgctattttctcaggccgggcctaatacaatggccaatcaggcaaagaactggctgccaggaccctgttaccgccaacaacgcgtctcaacgacaaccgggcaaaacaacaatagcaactttgcctggactgctgggaccaaataccatctgaatggaagaaattcattgatgaatcctggccccgctatggcatcccacaaagagggcgaggaccgtttttttcccctgtccgggtccctgatttttggcaaacaaaatgctgccagagacaatgcggattacagcgatgtcatgctcaccagcgaggaagaaatcaaaaccactaaccctgtggctacagaggaatacggtatcgtggcagataacttgcagcagcaaaacacggctcctcaaattggaactgtcaacagccagggggccttacccggtatggtctggcagaaccgggacgtgtacctgcagggtcccatctgggccaagattcctcacacggacggcaacttccacccgtctccgctgatgggcggctttggcctgaaacatcctccgcctcagatcctgatcaagaacacgcctgtacctgcggatcctccgaccaccttcaaccagtcaaagctgaactctttcatcacgcaatacagcaccggacaggtcagcgtggaaattgaatgggagctgcagaaggaaaacagcaagcgctggaaccccgagatccagtacacctccaactactacaaatctacaagtgtggactttgctgttaatacagaaggcgtgtactctgaaccccaccccattggcacccgttacctcacccgtcccctgtaa

SEQ ID NO: 169 - DNA, 1608 bp, Artificial Sequence
  AAV214-D5 VP3 capsid protein coding sequence
atggcttcaggcggtggcgcaccaatggcggacaataacgaaggcgccgacggagtgggtaatgcctcaggaaattggcattgcgattccacatggctgggcgacagagtcatcaccaccagcacccgcacctgggccttgcccacctacaataaccacctctacaagcaaatctccaacgggacttcgggaggaagcaccaacgacaacacctacttcggctacagcaccccctgggggtattttgacttcaacagattccactgccacttttcaccacgtgactggcaaagactcatcaacaacaactggggattccgacccaagagactcaacttcaagctctttaacattcaagtcaaagaggttacggacaacaatggagtcaagaccatcgccaataaccttaccagcacggtccaggtcttcacggactcagactatcagctcccgtacgtcctcggctctgcgcaccagggctgcctccctccgttcccggcggacgtgttcatgattccgcagtacggctacctaacgctcaacgacggcagccaggcagtgggacggtcatccttttactgcctggaatatttcccatcgcagatgctgagaacgggcaacaactttaccttcagctacacctttgaggacgttcctttccacagcagctacgctcacagccagagtctggaccgtctcatgaatcctctgattgaccagtacctgtactacttgtctaagactcagtccacgggaggtaccgcaggaactcagcagttgctattttctcaggccgggcctaatacaatggccaatcaggcaaagaactggctgccaggaccctgttaccgccaacaacgcgtctcaacgacaaccgggcaaaacaacaatagcaactttgcctggactgctgggaccaaataccatctgaatggaagaaattcattgatgaatcctggccccgctatggcatcccacaaagagggcgaggaccgtttttttcccctgtccgggtccctgatttttggcaaacaaaatgctgccagagacaatgcggattacagcgatgtcatgctcaccagcgaggaagaaatcaaaaccactaaccctgtggctacagaggaatacggtatcgtggcagataacttgcagcagcaaaacacggctcctcaaattggaactgtcaacagccagggggccttacccggtatggtctggcagaaccgggacgtgtacctgcagggtcccatctgggccaagattcctcacacggacggcaacttccacccgtctccgctgatgggcggctttggcctgaaacatcctccgcctcagatcctgatcaagaacacgcctgtacctgcggatcctccgaccaccttcaaccagtcaaagctgaactctttcatcacgcaatacagcaccggacaggtcagcgtggaaattgaatgggagctgcagaaggaaaacagcaagcgctggaaccccgagatccagtacacctccaactactacaaatctacaagtgtggactttgctgttaatacagaaggcgtgtactctgaaccccaccccattggcacccgttacctcacccgtcccctgtaa

SEQ ID NO: 170 - protein, 8 aa, Artificial Sequence
  VR-I
NGTSGGST

SEQ ID NO: 171 - protein, 11 aa, Artificial Sequence
  VR-IV
QSTGGTAGTQQ

SEQ ID NO: 172 - DNA, 6822 bp, Homo sapiens
atgggcttcgtgagacagatacagcttttgctctggaagaactggaccctgcggaaaaggcaaaagattcgctttgtggtggaactcgtgtggcctttatctttatttctggtcttgatctggttaaggaatgccaacccactctacagccatcatgaatgccatttccccaacaaggcgatgccctcagcaggaatgctgccgtggctccaggggatcttctgcaatgtgaacaatccctgttttcaaagccccaccccaggagaatctcctggaattgtgtcaaactataacaactccatcttggcaagggtatatcgagattttcaagaactcctcatgaatgcaccagagagccagcaccttggccgtatttggacagagctacacatcttgtcccaattcatggacaccctccggactcacccggagagaattgcaggaagaggaatacgaataagggatatcttgaaagatgaagaaacactgacactatttctcattaaaaacatcggcctgtctgactcagtggtctaccttctgatcaactctcaagtccgtccagagcagttcgctcatggagtcccggacctggcgctgaaggacatcgcctgcagcgaggccctcctggagcgcttcatcatcttcagccagagacgcggggcaaagacggtgcgctatgccctgtgctccctctcccagggcaccctacagtggatagaagacactctgtatgccaacgtggacttcttcaagctcttccgtgtgcttcccacactcctagacagccgttctcaaggtatcaatctgagatcttggggaggaatattatctgatatgtcaccaagaattcaagagtttatccatcggccgagtatgcaggacttgctgtgggtgaccaggcccctcatgcagaatggtggtccagagacctttacaaagctgatgggcatcctgtctgacctcctgtgtggctaccccgagggaggtggctctcgggtgctctccttcaactggtatgaagacaataactataaggcctttctggggattgactccacaaggaaggatcctatctattcttatgacagaagaacaacatccttttgtaatgcattgatccagagcctggagtcaaatcctttaaccaaaatcgcttggagggcggcaaagcctttgctgatgggaaaaatcctgtacactcctgattcacctgcagcacgaaggatactgaagaatgccaactcaacttttgaagaactggaacacgttaggaagttggtcaaagcctgggaagaagtagggccccagatctggtacttctttgacaacagcacacagatgaacatgatcagagataccctggggaacccaacagtaaaagactttttgaataggcagcttggtgaagaaggtattactgctgaagccatcctaaacttcctctacaagggccctcgggaaagccaggctgacgacatggccaacttcgactggagggacatatttaacatcactgatcgcaccctccgcctggtcaatcaatacctggagtgcttggtcctggataagtttgaaagctacaatgatgaaactcagctcacccaacgtgccctctctctactggaggaaaacatgttctgggccggagtggtattccctgacatgtatccctggaccagctctctaccaccccacgtgaagtataagatccgaatggacatagacgtggtggagaaaaccaataagattaaagacaggtattgggattctggtcccagagctgatcccgtggaagatttccggtacatctggggcgggtttgcctatctgcaggacatggttgaacaggggatcacaaggagccaggtgcaggcggaggctccagttggaatctacctccagcagatgccctacccctgcttcgtggacgattctttcatgatcatcctgaaccgctgtttccctatcttcatggtgctggcatggatctactctgtctccatgactgtgaagagcatcgtcttggagaaggagttgcgactgaaggagaccttgaaaaatcagggtgtctccaatgcagtgatttggtgtacctggttcctggacagcttctccatcatgtcgatgagcatcttcctcctgacgatattcatcatgcatggaagaatcctacattacagcgacccattcatcctcttcctgttcttgttggctttctccactgccaccatcatgctgtgctttctgctcagcaccttcttctccaaggccagtctggcagcagcctgtagtggtgtcatctatttcaccctctacctgccacacatcctgtgcttcgcctggcaggaccgcatgaccgctgagctgaagaaggctgtgagcttactgtctccggtggcatttggatttggcactgagtacctggttcgctttgaagagcaaggcctggggctgcagtggagcaacatcgggaacagtcccacggaaggggacgaattcagcttcctgctgtccatgcagatgatgctccttgatgctgctgtctatggcttactcgcttggtaccttgatcaggtgtttccaggagactatggaaccccacttccttggtactttcttctacaagagtcgtattggcttggcggtgaagggtgttcaaccagagaagaaagagccctggaaaagaccgagcccctaacagaggaaacggaggatccagagcacccagaaggaatacacgactccttctttgaacgtgagcatccagggtgggttcctggggtatgcgtgaagaatctggtaaagatttttgagccctgtggccggccagctgtggaccgtctgaacatcaccttctacgagaaccagatcaccgcattcctgggccacaatggagctgggaaaaccaccaccttgtccatcctgacgggtctgttgccaccaacctctgggactgtgctcgttgggggaagggacattgaaaccagcctggatgcagtccggcagagccttggcatgtgtccacagcacaacatcctgttccaccacctcacggtggctgagcacatgctgttctatgcccagctgaaaggaaagtcccaggaggaggcccagctggagatggaagccatgttggaggacacaggcctccaccacaagcggaatgaagaggctcaggacctatcaggtggcatgcagagaaagctgtcggttgccattgcctttgtgggagatgccaaggtggtgattctggacgaacccacctctggggtggacccttactcgagacgctcaatctgggatctgctcctgaagtatcgctcaggcagaaccatcatcatgtccactcaccacatggacgaggccgacctccttggggaccgcattgccatcattgcccagggaaggctctactgctcaggcaccccactcttcctgaagaactgctttggcacaggcttgtacttaaccttggtgcgcaagatgaaaaacatccagagccaaaggaaaggcagtgaggggacctgcagctgctcgtctaagggtttctccaccacgtgtccagcccacgtcgatgacctaactccagaacaagtcctggatggggatgtaaatgagctgatggatgtagttctccaccatgttccagaggcaaagctggtggagtgcattggtcaagaacttatcttccttcttccaaataagaacttcaagcacagagcatatgccagccttttcagagagctggaggagacgctggctgaccttggtctcagcagttttggaatttctgacactcccctggaagagatttttctgaaggtcacggaggattctgattcaggacctctgtttgcgggtggcgctcagcagaaaagagaaaacgtcaacccccgacacccctgcttgggtcccagagagaaggctggacagacaccccaggactccaatgtctgctccccaggggcgccggctgctcacccagagggccagcctcccccagagccagagtgcccaggcccgcagctcaacacggggacacagctggtcctccagcatgtgcaggcgctgctggtcaagagattccaacacaccatccgcagccacaaggacttcctggcgcagatcgtgctcccggctacctttgtgtttttggctctgatgctttctattgttatccctccttttggcgaataccccgctttgacccttcacccctggatatatgggcagcagtacaccttcttcagcatggatgaaccaggcagtgagcagttcacggtacttgcagacgtcctcctgaataagccaggctttggcaaccgctgcctgaaggaagggtggcttccggagtacccctgtggcaactcaacaccctggaagactccttctgtgtccccaaacatcacccagctgttccagaagcagaaatggacacaggtcaacccttcaccatcctgcaggtgcagcaccagggagaagctcaccatgctgccagagtgccccgagggtgccgggggcctcccgcccccccagagaacacagcgcagcacggaaattctacaagacctgacggacaggaacatctccgacttcttggtaaaaacgtatcctgctcttataagaagcagcttaaagagcaaattctgggtcaatgaacagaggtatggaggaatttccattggaggaaagctcccagtcgtccccatcacgggggaagcacttgttgggtttttaagcgaccttggccggatcatgaatgtgagcgggggccctatcactagagaggcctctaaagaaatacctgatttccttaaacatctagaaactgaagacaacattaaggtgtggtttaataacaaaggctggcatgccctggtcagctttctcaatgtggcccacaacgccatcttacgggccagcctgcctaaggacaggagccccgaggagtatggaatcaccgtcattagccaacccctgaacctgaccaaggagcagctctcagagattacagtgctgaccacttcagtggatgctgtggttgccatctgcgtgattttctccatgtccttcgtcccagccagctttgtcctttatttgatccaggagcgggtgaacaaatccaagcacctccagtttatcagtggagtgagccccaccacctactgggtgaccaacttcctctgggacatcatgaattattccgtgagtgctgggctggtggtgggcatcttcatcgggtttcagaagaaagcctacacttctccagaaaaccttcctgcccttgtggcactgctcctgctgtatggatgggcggtcattcccatgatgtacccagcatccttcctgtttgatgtccccagcacagcctatgtggctttatcttgtgctaatctgttcatcggcatcaacagcagtgctattaccttcatcttggaattatttgagaataaccggacgctgctcaggttcaacgccgtgctgaggaagctgctcattgtcttcccccacttctgcctgggccggggcctcattgaccttgcactgagccaggctgtgacagatgtctatgcccggtttggtgaggagcactctgcaaatccgttccactgggacctgattgggaagaacctgtttgccatggtggtggaaggggtggtgtacttcctcctgaccctgctggtccagcgccacttcttcctctcccaatggattgccgagcccactaaggagcccattgttgatgaagatgatgatgtggctgaagaaagacaaagaattattactggtggaaataaaactgacatcttaaggctacatgaactaaccaagatttatccaggcacctccagcccagcagtggacaggctgtgtgtcggagttcgccctggagagtgctttggcctcctgggagtgaatggtgccggcaaaacaaccacattcaagatgctcactggggacaccacagtgacctcaggggatgccaccgtagcaggcaagagtattttaaccaatatttctgaagtccatcaaaatatgggctactgtcctcagtttgatgcaattgatgagctgctcacaggacgagaacatctttacctttatgcccggcttcgaggtgtaccagcagaagaaatcgaaaaggttgcaaactggagtattaagagcctgggcctgactgtctacgccgactgcctggctggcacgtacagtgggggcaacaagcggaaactctccacagccatcgcactcattggctgcccaccgctggtgctgctggatgagcccaccacagggatggacccccaggcacgccgcatgctgtggaacgtcatcgtgagcatcatcagagaagggagggctgtggtcctcacatcccacagcatggaagaatgtgaggcactgtgtacccggctggccatcatggtaaagggcgcctttcgatgtatgggcaccattcagcatctcaagtccaaatttggagatggctatatcgtcacaatgaagatcaaatccccgaaggacgacctgcttcctgacctgaaccctgtggagcagttcttccaggggaacttcccaggcagtgtgcagagggagaggcactacaacatgctccagttccaggtctcctcctcctccctggcgaggatcttccagctcctcctctcccacaaggacagcctgctcatcgaggagtactcagtcacacagaccacactggaccaggtgtttgtaaattttgctaaacagcagactgaaagtcatgacctccctctgcaccctcgagctgctggagccagtcgacaagcccaggactga

SEQ ID NO: 173 - DNA, 1758 bp, Homo sapiens
atgaccatcacttacacaagccaagtggctaatgcccgcttaggctccttctcccgcctgctgctgtgctggcggggcagcatctacaagctgctatatggcgagttcttaatcttcctgctctgctactacatcatccgctttatttataggctggccctcacggaagaacaacagctgatgtttgagaaactgactctgtattgcgacagctacatccagctcatccccatttccttcgtgctgggcttctacgtgacgctggtcgtgacccgctggtggaaccagtacgagaacctgccgtggcccgaccgcctcatgagcctggtgtcgggcttcgtcgaaggcaaggacgagcaaggccggctgctgcggcgcacgctcatccgctacgccaacctgggcaacgtgctcatcctgcgcagcgtcagcaccgcagtctacaagcgcttccccagcgcccagcacctggtgcaagcaggctttatgactccggcagaacacaagcagttggagaaactgagcctaccacacaacatgttctgggtgccctgggtgtggtttgccaacctgtcaatgaaggcgtggcttggaggtcgaatccgggaccctatcctgctccagagcctgctgaacgagatgaacaccttgcgtactcagtgtggacacctgtatgcctacgactggattagtatcccactggtgtatacacaggtggtgactgtggcggtgtacagcttcttcctgacttgtctagttgggcggcagtttctgaacccagccaaggcctaccctggccatgagctggacctcgttgtgcccgtcttcacgttcctgcagttcttcttctatgttggctggctgaaggtggcagagcagctcatcaacccctttggagaggatgatgatgattttgagaccaactggattgtcgacaggaatttgcaggtgtccctgttggctgtggatgagatgcaccaggacctgcctcggatggagccggacatgtactggaataagcccgagccacagcccccctacacagctgcttccgcccagttccgtcgagcctcctttatgggctccaccttcaacatcagcctgaacaaagaggagatggagttccagcccaatcaggaggacgaggaggatgctcacgctggcatcattggccgcttcctaggcctgcagtcccatgatcaccatcctcccagggcaaactcaaggaccaaactactgtggcccaagagggaatcccttctccacgagggcctgcccaaaaaccacaaggcagccaaacagaacgttaggggccaggaagacaacaaggcctggaagcttaaggctgtggacgccttcaagtctgccccactgtatcagaggccaggctactacagtgccccacagacgcccctcagccccactcccatgttcttccccctagaaccatcagcgccgtcaaagcttcacagtgtcacaggcatagacaccaaagacaaaagcttaaagactgtgagttctggggccaagaaaagttttgaattgctctcagagagcgatggggccttgatggagcacccagaagtatctcaagtgaggaggaaaactgtggagtttaacctgacggatatgccagagatccccgaaaatcacctcaaagaacctttggaacaatcaccaaccaacatacacactacactcaaagatcacatggatccttattgggccttggaaaacagggatgaagcacattcctaa

SEQ ID NO: 174 - DNA, 1815 bp, Homo sapiens
atgtttgagaaactgactctgtattgcgacagctacatccagctcatccccatttccttcgtgctgggcttctacgtgacgctggtcgtgacccgctggtggaaccagtacgagaacctgccgtggcccgaccgcctcatgagcctggtgtcgggcttcgtcgaaggcaaggacgagcaaggccggctgctgcggcgcacgctcatccgctacgccaacctgggcaacgtgctcatcctgcgcagcgtcagcaccgcagtctacaagcgcttccccagcgcccagcacctggtgcaagcaggctttatgactccggcagaacacaagcagttggagaaactgagcctaccacacaacatgttctgggtgccctgggtgtggtttgccaacctgtcaatgaaggcgtggcttggaggtcgaatccgggaccctatcctgctccagagcctgctgaacgagatgaacaccttgcgtactcagtgtggacacctgtatgcctacgactggattagtatcccactggtgtatacacaggtggtgactgtggcggtgtacagcttcttcctgacttgtctagttgggcggcagtttctgaacccagccaaggcctaccctggccatgagctggacctcgttgtgcccgtcttcacgttcctgcagttcttcttctatgttggctggctgaaggtggcagagcagctcatcaacccctttggagaggatgatgatgattttgagaccaactggattgtcgacaggaatttgcaggtgtccctgttggctgtggatgagatgcaccaggacctgcctcggatggagccggacatgtactggaataagcccgagccacagcccccctacacagctgcttccgcccagttccgtcgagcctcctttatgggctccaccttcaacatcagcctgaacaaagaggagatggagttccagcccaatcaggaggacgaggaggatgctcacgctggcatcattggccgcttcctaggcctgcagtcccatgatcaccatcctcccagggcaaactcaaggaccaaactactgtggcccaagagggaatcccttctccacgagggcctgcccaaaaaccacaaggcagccaaacagaacgttaggggccaggaagacaacaaggcctggaagcttaaggctgtggacgccttcaagtctgccccactgtatcagaggccaggctactacagtgccccacagacgcccctcagccccactcccatgttcttccccctagaaccatcagcgccgtcaaagcttcacagtgtcacaggcatagacaccaaagacaaaagcttaaagactgtgagttctggggccaagaaaagttttgaattgctctcagagagcgatggggccttgatggagcacccagaagtatctcaagtgaggaggaaaactgtggagtttaacctgacggatatgccagagatccccgaaaatcacctcaaagaacctttggaacaatcaccaaccaacatacacactacactcaaagatcacatggatccttattgggccttggaaaacaggtctgtcctccacctgaaccaggggcactgcattgccctgtgccccaccccagcttcccttgctctgagcctacccttcctccacaatttcctagggttccatcactgccagagcacactggacctacgcccagcactggcttggggtatatacttggccaccttcacagggatcctagggaagtgttcgggaccttttctcacttcaccctggtatcacccggaagacttcttgggaccaggtgaaggaagatga

SEQ ID NO: 175 - DNA, 2883 bp, Homo sapiens
atgtggcgactacgtcgggccgctgtggcctgtgaggtctgccagtctttagtgaaacacagctctggaataaaaggaagtttaccactacaaaaactacatctggtttcacgaagcatttatcattcacatcatcctaccttaaagcttcaacgaccccaattaaggacatcctttcagcagttctcttctctgacaaaccttcctttacgtaaactgaaattctctccaattaaatatggctaccagcctcgcaggaatttttggccagcaagattagctacgagactcttaaaacttcgctatctcatactaggatcggctgttgggggtggctacacagccaaaaagacttttgatcagtggaaagatatgataccggaccttagtgaatataaatggattgtgcctgacattgtgtgggaaattgatgagtatatcgattttgagaaaattagaaaagcccttcctagttcagaagaccttgtaaagttagcaccagactttgacaagattgttgaaagccttagcttattgaaggacttttttacctcaggttctccggaagaaacggcgtttagagcaacagatcgtggatctgaaagtgacaagcattttagaaaggtgtcagacaaagagaaaattgaccaacttcaggaagaacttctgcacactcagttgaagtatcagagaatcttggaacgattagaaaaggagaacaaagaattgagaaaattagtattgcagaaagatgacaaaggcattcatcatagaaagcttaagaaatctttgattgacatgtattctgaagttcttgatgttctctctgattatgatgccagttataatacgcaagatcatctgccacgggttgttgtggttggagatcagagtgctggaaagactagtgtgttggaaatgattgcccaagctcgaatattcccaagaggatctggggagatgatgacacgttctccagttaaggtgactctgagtgaaggtcctcaccatgtggccctatttaaagatagttctcgggagtttgatcttaccaaagaagaagatcttgcagcattaagacatgaaatagaacttcgaatgaggaaaaatgtgaaagaaggctgtaccgttagccctgagaccatatccttaaatgtaaaaggccctggactacagaggatggtgcttgttgacttaccaggtgtgattaatactgtgacatcaggcatggctcctgacacaaaggaaactattttcagtatcagcaaagcttacatgcagaatcctaatgccatcatactgtgtattcaagatggatctgtggatgctgaacgcagtattgttacagacttggtcagtcaaatggaccctcatggaaggagaaccatattcgttttgaccaaagtagacctggcagagaaaaatgtagccagtccaagcaggattcagcagataattgaaggaaagctcttcccaatgaaagctttaggttattttgctgttgtaacaggaaaagggaacagctctgaaagcattgaagctataagagaatatgaagaagagttttttcagaattcaaagctcctaaagacaagcatgctaaaggcacaccaagtgactacaagaaatttaagccttgcagtatcagactgcttttggaaaatggtacgagagtctgttgaacaacaggctgatagtttcaaagcaacacgttttaaccttgaaactgaatggaagaataactatcctcgcctgcgggaacttgaccggaatgaactatttgaaaaagctaaaaatgaaatccttgatgaagttatcagtctgagccaggttacaccaaaacattgggaggaaatccttcaacaatctttgtgggaaagagtatcaactcatgtgattgaaaacatctaccttccagctgcgcagaccatgaattcaggaacttttaacaccacagtggatatcaagcttaaacagtggactgataaacaacttcctaataaagcagtagaggttgcttgggagaccctacaagaagaattttcccgctttatgacagaaccgaaagggaaagagcatgatgacatatttgataaacttaaagaggctgttaaggaagaaagtattaaacgacacaagtggaatgactttgcggaggacagcttgagggttattcaacacaatgctttggaagaccgatccatatctgataaacagcaatgggatgcagctatttattttatggaagaggctctgcaggctcgtctcaaggatactgaaaatgcaattgaaaacatggtgggtccagactggaaaaagaggtggttatactggaagaatcggacccaagaacagtgtgttcacaatgaaaccaagaatgaattggagaagatgttgaaatgtaatgaggagcacccagcttatcttgcaagtgatgaaataaccacagtccggaagaaccttgaatcccgaggagtagaagtagatccaagcttgattaaggatacttggcatcaagtttatagaagacattttttaaaaacagctctaaaccattgtaacctttgtcgaagaggtttttattactaccaaaggcattttgtagattctgagttggaatgcaatgatgtggtcttgttttggcgtatacagcgcatgcttgctatcaccgcaaatactttaaggcaacaacttacaaatactgaagttaggcgattagagaaaaatgttaaagaggtattggaagattttgctgaagatggtgagaagaagattaaattgcttactggtaaacgcgttcaactggcggaagacctcaagaaagttagagaaattcaagaaaaacttgatgctttcattgaagctcttcatcaggagaaataa

SEQ ID NO: 176 - DNA, 381 bp, Homo sapiens
atgcggaccaagatgcgcatcatgggcttccggggcacggtcatcaagccgctgaacgaggaggcggcagctgagctgggcgcagagctgctgggcgaagccaccatcttcatcgtgggcggcggctgcctagtgctggagtactggcgccaccaggcgcagcagcgccacaaggaggaggagcagcgtgctgcctggaacgcgctgcgggacgaggtgggccacctggcgctggcgctggaagcgctgcaggcgcaggtgcaggcggcgccgccacagggcgccctggaggaactgcgcacagagctgcaagaggtgcgcgcccagctctgcaatcccggccggtccgcttcccacgcagtgcctgcgtccaagaaatag

SEQ ID NO: 177 - protein, 2273 aa, Homo sapiens [sequence omitted]

SEQ ID NO: 178 - protein, 585 aa, Homo sapiens
MTITYTSQVANARLGSFSRLLLCWRGSIYKLLYGEFLIFLLCYYIIRFIYRLALTEEQQLMFEKLTLYCDSYIQLIPISFVLGFYVTLVVTRWWNQYENLPWPDRLMSLVSGFVEGKDEQGRLLRRTLIRYANLGNVLILRSVSTAVYKRFPSAQHLVQAGFMTPAEHKQLEKLSLPHNMFWVPWVWFANLSMKAWLGGRIRDPILLQSLLNEMNTLRTQCGHLYAYDWISIPLVYTQVVTVAVYSFFLTCLVGRQFLNPAKAYPGHELDLVVPVFTFLQFFFYVGWLKVAEQLINPFGEDDDDFETNWIVDRNLQVSLLAVDEMHQDLPRMEPDMYWNKPEPQPPYTAASAQFRRASFMGSTFNISLNKEEMEFQPNQEDEEDAHAGIIGRFLGLQSHDHHPPRANSRTKLLWPKRESLLHEGLPKNHKAAKQNVRGQEDNKAWKLKAVDAFKSAPLYQRPGYYSAPQTPLSPTPMFFPLEPSAPSKLHSVTGIDTKDKSLKTVSSGAKKSFELLSESDGALMEHPEVSQVRRKTVEFNLTDMPEIPENHLKEPLEQSPTNIHTTLKDHMDPYWALENRDEAHS

SEQ ID NO: 179 - protein, 604 aa, Homo sapiens
MFEKLTLYCDSYIQLIPISFVLGFYVTLVVTRWWNQYENLPWPDRLMSLVSGFVEGKDEQGRLLRRTLIRYANLGNVLILRSVSTAVYKRFPSAQHLVQAGFMTPAEHKQLEKLSLPHNMFWVPWVWFANLSMKAWLGGRIRDPILLQSLLNEMNTLRTQCGHLYAYDWISIPLVYTQVVTVAVYSFFLTCLVGRQFLNPAKAYPGHELDLVVPVFTFLQFFFYVGWLKVAEQLINPFGEDDDDFETNWIVDRNLQVSLLAVDEMHQDLPRMEPDMYWNKPEPQPPYTAASAQFRRASFMGSTFNISLNKEEMEFQPNQEDEEDAHAGIIGRFLGLQSHDHHPPRANSRTKLLWPKRESLLHEGLPKNHKAAKQNVRGQEDNKAWKLKAVDAFKSAPLYQRPGYYSAPQTPLSPTPMFFPLEPSAPSKLHSVTGIDTKDKSLKTVSSGAKKSFELLSESDGALMEHPEVSQVRRKTVEFNLTDMPEIPENHLKEPLEQSPTNIHTTLKDHMDPYWALENRSVLHLNQGHCIALCPTPASLALSLPFLHNFLGFHHCQSTLDLRPALAWGIYLATFTGILGKCSGPFLTSPWYHPEDFLGPGEGR

SEQ ID NO: 180 - protein, 960 aa, Homo sapiens
MWRLRRAAVACEVCQSLVKHSSGIKGSLPLQKLHLVSRSIYHSHHPTLKLQRPQLRTSFQQFSSLTNLPLRKLKFSPIKYGYQPRRNFWPARLATRLLKLRYLILGSAVGGGYTAKKTFDQWKDMIPDLSEYKWIVPDIVWEIDEYIDFEKIRKALPSSEDLVKLAPDFDKIVESLSLLKDFFTSGSPEETAFRATDRGSESDKHFRKVSDKEKIDQLQEELLHTQLKYQRILERLEKENKELRKLVLQKDDKGIHHRKLKKSLIDMYSEVLDVLSDYDASYNTQDHLPRVVVVGDQSAGKTSVLEMIAQARIFPRGSGEMMTRSPVKVTLSEGPHHVALFKDSSREFDLTKEEDLAALRHEIELRMRKNVKEGCTVSPETISLNVKGPGLQRMVLVDLPGVINTVTSGMAPDTKETIFSISKAYMQNPNAIILCIQDGSVDAERSIVTDLVSQMDPHGRRTIFVLTKVDLAEKNVASPSRIQQIIEGKLFPMKALGYFAVVTGKGNSSESIEAIREYEEEFFQNSKLLKTSMLKAHQVTTRNLSLAVSDCFWKMVRESVEQQADSFKATRFNLETEWKNNYPRLRELDRNELFEKAKNEILDEVISLSQVTPKHWEEILQQSLWERVSTHVIENIYLPAAQTMNSGTFNTTVDIKLKQWTDKQLPNKAVEVAWETLQEEFSRFMTEPKGKEHDDIFDKLKEAVKEESIKRHKWNDFAEDSLRVIQHNALEDRSISDKQQWDAAIYFMEEALQARLKDTENAIENMVGPDWKKRWLYWKNRTQEQCVHNETKNELEKMLKCNEEHPAYLASDEITTVRKNLESRGVEVDPSLIKDTWHQVYRRHFLKTALNHCNLCRRGFYYYQRHFVDSELECNDVVLFWRIQRMLAITANTLRQQLTNTEVRRLEKNVKEVLEDFAEDGEKKIKLLTGKRVQLAEDLKKVREIQEKLDAFIEALHQEK

SEQ ID NO: 181 - protein, 126 aa, Homo sapiens
MRTKMRIMGFRGTVIKPLNEEAAAELGAELLGEATIFIVGGGCLVLEYWRHQAQQRHKEEEQRAAWNALRDEVGHLALALEALQAQVQAAPPQGALEELRTELQEVRAQLCNPGRSASHAVPASKK

What is claimed is:

1. A method of treating an ophthalmic disease or disorder in a subject in need thereof, comprising para-retinal administration of an AAV viral vector to the subject, wherein the AAV viral vector comprises an AAV capsid protein comprising the amino acid sequence of SEQ ID NO: 2.

2. A method of treating an ophthalmic disease or disorder in a subject in need thereof, comprising para-retinal administration of an AAV viral vector to the subject, wherein the AAV viral vector comprises an AAV capsid protein comprising or consisting of an amino acid sequence that is at least 95%, at least 98%, at least 99%, at least 99.5%, or 100% identical to any one of SEQ ID NO: 1-3, 30-34, 49, 67, 84, and 164.

3. The method of claim 2, wherein the AAV viral vector comprises an AAV capsid protein comprising an amino acid sequence that is up to 1, 2, 3, 4, 5, 6, 7, 8, 9, or 10 amino acids different from any one of SEQ ID NO: 1-3, 30-34, 49, 67, 84 and 164.

4. The method of claim 2, wherein the AAV viral vector comprises an AAV capsid protein comprising or consisting of the amino acid sequence of SED ID NO: 2 or an amino acid sequence that is up to 1, 2, 3, 4, 5, 6, 7, 8, 9, or 10 amino acids different from SEQ ID NO: 2.

5. The method of claim 4, wherein the AAV capsid protein comprises a leucine (L) at amino acid 129 of SEQ ID NO: 2, an asparagine (N) at amino acid 586 of SEQ ID NO: 2, and a glutamic acid (E) at amino acid 723 of SEQ ID NO: 2.

6. The method of claim 2, wherein the AAV viral vector comprises an AAV capsid protein comprising or consisting of the amino acid sequence of SED ID NO: 1 or an amino acid sequence that is up to 2, 2, 3, 4, 5, 6, 7, 8, 9, or 10 amino acids different from SEQ ID NO: 1.

7. The method of claim 6, wherein the AAV capsid protein comprises a leucine (L) at amino acid 129, a proline (P) at amino acid 148, a arginine (R) at amino acid 152, a serine (S) at amino acid 153, a threonine (T) at amino acid 158, a lysine (K) at amino acid 163, a arginine (R) at amino acid 169, a tryptophan (W) at amino acid 306, a phenylalanine (F) at amino acid 308, and a asparagine (N) at amino acid 319, wherein the amino acid positions are numbered with respect to SEQ ID NO: 1.

8. The method of claim 2, wherein the AAV viral vector comprises an AAV capsid protein comprising or consisting of the amino acid sequence of SED ID NO: 164 or an amino acid sequence that is up to 1, 2, 3, 4, 5, 6, 7, 8, 9, or 10 amino acids different from SEQ ID NO: 164.

9. The method of claim 2, wherein the AAV viral vector comprises an AAV capsid protein comprising or consisting of the amino acid sequence of SED ID NO: 67 or an amino acid sequence that is up to 1, 2, 3, 4, 5, 6, 7, 8, 9, or 10 amino acids different from SEQ ID NO: 67.

10. The method of claim 2, wherein the AAV viral vector comprises an AAV capsid protein comprising or consisting of the amino acid sequence of SED ID NO: 3 or an amino acid sequence that is up to 2, 2, 3, 4, 5, 6, 7, 8, 9, or 10 amino acids different from SEQ ID NO: 3.

11. The method of any one of claims 2-3 and 10, wherein the AAV capsid protein comprises a VP3 portion comprising variable regions (VR) I to IX wherein:
(a) VR-II comprises amino acid sequence
(SEQ ID NO: 54)
DNNGVK,
(b) VR-III comprises amino acid sequence
(SEQ ID NO: 55)
NDGS,
(c) VR-IV comprises amino acid sequence
(SEQ ID NO: 56)
INGSGQNQQT
or
(SEQ ID NO: 171)
QSTGGTAGTQQ,
(d) VR-V comprises amino acid sequence
(SEQ ID NO: 57)
RVSTTTGQNNNSNFAWTA,
(e) VR-VI comprises amino acid sequence
(SEQ ID NO: 58)
HKEGEDRFFPLSG,
(f) VR-VII comprises amino acid sequence
(SEQ ID NO: 59)
KQNAARDNADYSDV,
(g) VR-VIII comprises amino acid sequence
(SEQ ID NO: 60)
ADNLQQQNTAPQI,
and
(h) VR-IX comprises amino acid sequence
(SEQ ID NO: 61)
NYYKSTSVDF.

12. The method of claim 11, wherein the VR-I region comprises SASTGAS (SEQ ID NO. 52), NSTSGGSS (SEQ ID NO. 53), SSTSGGSS (SEQ ID NO. 87), or NGTSGGST (SEQ ID NO: 170).

13. The method of any one of claims 1-11, wherein the ophthalmic disease or disorder is selected from the group consisting of dominant optic atrophy, retinitis pigmentosa, macular degeneration, an eye disorder related to mutations in the bestrophin-1 (BEST-1) gene, Leber congenital amaurosis, cone-rod dystrophy, Stargardt disease, choroideremia, Usher Syndrome, retinoschisis, Bietti's Crystalline Dystrophy and Achromatopsia.

14. The method of claim 13, wherein the retinitis pigmentosa is autosomal recessive, autosomal dominant, or X-linked.

15. The method of claim 13, wherein the eye disorder related to mutations in the BEST-1 gene is vitelliform macular dystrophy, age-related macular degeneration, autosomal dominant vitreoretinochoroidopathy, glaucoma, or cataract.

16. The method of any one of claims 1-15, wherein the AAV viral vector comprises an AAV vector genome encoding a gene selected from SPATA7, LRAT, TULP1, AIPL1, RPGR, AIPL1, ABCA4, CHM, MY07A, CDH23, USH2A, CLRN1, RS1, CYP4V2, CNGA3, CNGB3, GNAT2, RHO, PDE6B, PDE6C, PDE6H, OPA1, OPA3, and BEST-1.

17. The method of any one of claims 1-15, wherein the AAV viral vector comprises an AAV vector encoding an antisense RNA, microRNA, siRNA, or guide RNA (gRNA).

18. The method of any one of claims 1-17, wherein the ophthalmic disease or disorder is related to a dysfunction of optic nerve.

19. The method of any one of claims 1-17, wherein the ophthalmic disease or disorder is Dominant Optic Atrophy.

20. The method of claim 19, wherein the AAV viral vector comprises an AAV vector genome comprising an OPA1 or OPA3 transgene.

21. The method of any one of claims 1-17, wherein the ophthalmic disease or disorder is Retinoschisis.

22. The method of claim 21, wherein the AAV viral vector comprises an AAV vector genome comprising a RS1 transgene.

23. The method of any one of claims 1-22, wherein the para-retinal administration comprises injecting at a distance of between 0-13 millimeters (mm), between 0-10 mm, between 0-5 mm, or between 0-3 mm, from the surface of the retina in the posterior vitreous cavity of the eye.

24. The method of any one of claims 1-23, wherein the subject is a human.

25. A nucleic acid encoding an AAV capsid protein comprising a VP3 portion, wherein the VP3 portion comprises variable regions (VR) I to IX wherein:
(a) VR-II comprises amino acid sequence
(SEQ ID NO: 54)
DNNGVK,
(b) VR-III comprises amino acid sequence
(SEQ ID NO: 55)
NDGS,
(c) VR-IV comprises amino acid sequence
(SEQ ID NO: 171)
QSTGGTAGTQQ,
(d) VR-V comprises amino acid sequence
(SEQ ID NO: 57)
RVSTTTGQNNNSNFAWTA,
(e) VR-VI comprises amino acid sequence
(SEQ ID NO: 58)
HKEGEDRFFPLSG,
(f) VR-VII comprises amino acid sequence
(SEQ ID NO: 59)
KQNAARDNADYSDV,
(g) VR-VIII comprises amino acid sequence
(SEQ ID NO: 60)
ADNLQQQNTAPQI,
and
(h) VR-IX comprises amino acid sequence
(SEQ ID NO: 61)
NYYKSTSVDF.

26. The nucleic acid of claim 25, wherein the VR-I region comprises NGTSGGST (SEQ ID NO: 170).

27. The nucleic acid of claim 25, wherein the VP3 portion has the amino acid sequence of SEQ ID NO: 166.

28. The nucleic acid of any one of claims 25-27, wherein the AAV capsid protein further comprises i) a VP2 portion or ii) a VP1 portion and a VP2 portion.

29. The nucleic acid of any one of claims 25-27, wherein the encoded AAV capsid protein comprises an amino acid sequence at least 95%, at least 96%, at least 97%, at least 98%, at least 99%, or 100% identical to SEQ ID NO: 164 or an amino acid sequence having up to 1, 2, 3, 4, 5, 6, 7, 8, 9, or 10 amino acids different from SEQ ID NO: 164.

30. The nucleic acid of any one of claims 25-27, wherein the encoded AAV capsid protein comprises an amino acid sequence at least 95%, at least 96%, at least 97%, at least 98%, at least 99%, or 100% identical to SEQ ID NO: 165 or an amino acid sequence having up to 1, 2, 3, 4, 5, 6, 7, 8, 9, or 10 amino acids different from SEQ ID NO: 165.

31. The nucleic acid of any one of claims 25-27, wherein the encoded AAV capsid protein comprises an amino acid sequence at least 95%, at least 96%, at least 97%, at least 98%, at least 99%, or 100% identical to SEQ ID NO: 166 or an amino acid sequence having up to 1, 2, 3, 4, 5, 6, 7, 8, 9, or 10 amino acids different from SEQ ID NO: 166.

32. The nucleic acid of any one of claims 25-31, wherein the nucleic acid sequence is at least 95% identical to the nucleotide sequence selected from SEQ ID NOs: 167-169.

33. The nucleic acid of any one of claims 25-31, wherein the nucleic acid sequence is 100% identical to the nucleotide sequence selected from SEQ ID NOs: 167-169.

34. A vector comprising the nucleic acid of any one of claims 25-33.

35. An AAV capsid protein encoded by the nucleic acid of any one of claims 25-33.

36. The AAV capsid protein of claim 35, wherein the protein comprises the amino acid sequence of SEQ ID NO: 164, 165 or 166, or an amino acid sequence having up to 1, 2, 3, 4, 5, 6, 7, 8, 9, or 10 amino acids different from SEQ ID NO: 164, 165 or 166.

37. An AAV viral vector comprising the AAV capsid protein encoded by the nucleic acid of any one of claims 25-33 and an AAV vector genome, wherein the AAV vector genome comprises, in 5′ to 3′ orientation:
(a) a first AAV inverted terminal repeat,
(b) a promoter,
(c) a heterologous nucleic acid,
(d) a polyadenylation signal, and
(e) a second AAV inverted terminal repeat.

38. The AAV viral vector of claim 37, wherein the heterologous nucleic acid is operably linked to a constitutive promoter.

39. The AAV viral vector of claim 37 or 38, wherein the heterologous nucleic acid encodes a polypeptide.

40. The AAV viral vector of claim 37 or 38, wherein the heterologous nucleic acid encodes an antisense RNA, an siRNA, a microRNA, or a gRNA.

41. The AAV viral vector of any one of claims 37-41, wherein the AAV capsid protein comprises the amino acid sequence of SEQ ID NO: 164, 165 or 166.

42. An AAV viral vector comprising
(i) an AAV capsid protein having the amino acid sequence of SEQ ID NO: 164 and
(ii) an AAV vector genome, wherein the AAV vector genome comprises, in 5′ to 3′ orientation:
(a) a first AAV inverted terminal repeat,
(b) a promoter,
(c) a heterologous nucleic acid,
(d) a polyadenylation signal; and
(e) a second AAV inverted terminal repeat.

43. The AAV viral vector of any one of claims 37-39 and 41-42, wherein the heterologous nucleic acid encodes a polypeptide having at least 90% identity to any one of SEQ ID NOs: 142-144 and 177-181.

44. The AAV viral vector of claim 43, wherein the heterologous nucleic acid comprises a polynucleotide sequence having at least 90% identity to any one of SEQ ID NOs: 116-118 and 172-176.

45. A method of treating a disease or disorder comprising administering the AAV viral vector of any of claims 37-44 to a subject.

46. The method of claim 45, wherein the AAV viral vector is administered to the subject orally, rectally, transmucosally, inhalationally, transdermally, parenterally, intravenously, subcutaneously, intradermally, intramuscularly, intrapleurally, intracerebrally, intrathecally, intracerebrally, intraventricularly, intranasally, intra-aurally, intra-ocularly, peri-ocularly, topically, intralymphatically, intracistemally, intravitreally, para-retinally, or sub-retinally.

47. The method of claim 45 or 46, wherein the disease or disorder is amyotrophic lateral sclerosis (ALS), spinal muscular atrophy (SMA), Fabry disease, Pompe disease, CLN3 disease (or Juvenile Neuronal Ceroid Lipofuscinosis), recessive dystrophic epidermolysis bullosa (RDEB), juvenile Batten disease, autosomal dominant disorder, muscular dystrophy, hemophilia A, hemophilia B, multiple sclerosis, diabetes mellitus, Gaucher disease cancer, arthritis, muscle wasting, heart disease, intimal hyperplasia, epilepsy, Huntington's disease, Parkinson's disease, Alzheimer's disease, cystic fibrosis, thalassemia, Hurler's Syndrome, Sly syndrome, Scheie Syndrome, Hurler-Scheie Syndrome, Hunter's Syndrome, Sanfilippo Syndrome A (mucopolysaccharidosis IIIA or MPS IIIA), Sanfilippo Syndrome B (mucopolysaccharidosis IIIB or MPS IIIB), Sanfilippo Syndrome C, Sanfilippo Syndrome D, Morquio Syndrome, Maroteaux-Lamy Syndrome, Krabbe's disease, phenylketonuria, Batten's disease, spinal cerebral ataxia, LDL receptor deficiency, hyperammonemia, arthritis, macular degeneration, retinitis pigmentosa, ceroid lipofuscinosis, neuronal, 1 (CLN1), adenosine deaminase deficiency, Dominant Optic Atrophy, Retinoschisis, Stargardt disease, Bietti's Crystalline Dystrophy or BEST vitelliform macular dystrophy.

48. The method of claim 45 or 46, wherein the diseases or disorder is an ophthalmic disease or disorder.

49. The method of claim 48, wherein the ophthalmic disease or disorder is selected from the group consisting of dominant optic atrophy, retinitis pigmentosa, macular degeneration, an eye disorder related to mutations in the bestrophin-1 (BEST-1) gene, Leber congenital amaurosis, cone-rod dystrophy, Stargardt disease, choroideremia, Usher Syndrome, retinoschisis, Bietti's Crystalline Dystrophy and Achromatopsia.

50. The method of any of claims 45-49, wherein the subject is a human.
